United States Patent Application Publication US 2022/0184174 A1 - sequence listing, part 2

SEQ ID NO: 38 - DNA, 2378692 bp, Staphylococcus hominis
ccaagcggtaacggaagccaaagctcatatcaatgaagcaataaataattcaggtgtggatgaagcaaaaacaaatggtacaactacaatcaatgcaatccaaccagaagtaatcaaaaaatcagaagcaagacaagcaattgatgatattgcaagagctaagaaagaagcaattgatcaaacaccagatgcgacaacagaagaaaaagaggcagccaaagtaaaagtagaccaagcagtaacggaggctaaagcccatatcaacgaagcaataaataattcaggtgtggatgaagcaaaaacaaatggtacaactacaatcaatgtaatccaaccagaagtaatcaaaaaatcagagtcaagacaagcaatcgatgatattgcaagagctaaaaaagaagcgattgatcaaacaccgggtgcaacaacagaagaaaaagaggcagctaaagcgaaagtagaccaagcggtaacggaagccaaagcccatatcaacgaagcaataaataattcaggtgtggatgaagcaaaaacaaatggtacaactacaatcaatgcaatccaaccagaagtaatcaaaaaatcagaagcaagacaagcaattgatgatgctgcaagagccaagaaagaagcaattgatcaaacaccagatgcgacaacagaagaaaaagaagctgcaaaagcgaaagtagaccaagcggtaacggaagccaaagctcatatcaatgaagcaataaataattcaggtgtggatgaagcaaaaacaaatggtacaactacaatcaatgcaatccaaccagaagtaatcaaaaaatcagaagcaagacaagcaattgatgatgctgcaagagctaagaaagaagcaattgatcaaacaccagatgcgacaacagaagaaaaagaagcagctaaagcgaaagtagaccaagcggtaacggaagccaaaacgcatatcaatgaagcaataaataactcagatgtcgatgaagcaaaaacaaatggtacgaatacaatcaatgcaatccaaccagatgtgctaaaaaaagctgaagcaagacaagcaattgataatgaagttattaataagaagacagagatcgacaataatattgatgcaactatagaagaaaaagaagccgcaaaatcaaaagtagacgaagctgcaatagaagcaaaaaataatattaatcatacagaaataaatcaagctgttgatcaagcaaaagaagatggtgttacaacagttagtcatattcaaccaaatatagttaagaaaaaagcagcaaagactgcaatcgatgaagtagctagaattaaaaaagaagcgattgatcaaacaccgggtgcaacaacagaagaaaaagaagccgcaaaatcaaaagtagacgaagttgcaacagaagcaagaaataatattaatcgtgctttatctaataatgatgtagatcaagtagtacataatagtacggcatcaataaataatatccagccagatatagttaaaaaagaacaagcaaaacgaggtatagatactcaagcaaaaatcaaaaaagccatcattgatcaaacatctgatgcaacaacagaagaaaaagaagcagcgaaatcaaaaattgatgaagaagttacaaaagcaaaacatagtattgatcaagcagtaacaaatagtgatgtagatcaagcaaaagatacaggaactgttgctataaataacattcagccagaaattgtaaaaaaagagacagctaagacttctattgatcaaattgcattaactagaaaaaacatcattgatcaaacacctgatgcaacaacagaagaaaaagaagcagcgaaatcaaaagttgatgaagaggtaacaaaagcaaaacgtaacattaatcaagcagttacaaataatgatgtgaatcaagttgagcataatagcacaatagcaattaataatatccaacccaatattattaaaaaaattgcagctaaaacgttaattgatcaagtagcaagagctaaaaaaaataatattgatcaaacatcaaatgcgacaatagaagaaaaagaagcagcaaaacaaaaagttgacgaagaagttacaaaagcaaaacatagtattgatcaagcaataacaaatagtgatgtagatcaagcaaaagatagaggaaatgttgctataaataacattcagccagaagttgtaaaaaaagagacagctaagaatgctattgatcaaattgcattaactaggaaagccatcattgatcaaacacctgatgcaactgaagaagaaaaagaagcagcgaaatcaaaaattgacgaagaagtcataaaagcaaaacatggaattgatcaagcaaaaacaaataatgacgtagatcaagttgaacaaaatagcactacaatgataaataatattcagccgacagtagttaaaaaatcagaagcaagacaagcaattgatgatttagctaaacttaaaaaagcaactattgatttaacgcaagaagcaactgaagaagaaaaagaagcagcgaaaagtaaagtggatcaagcgttaacagaagctaaaactcatatcaacgaagcagaaaatgatgaaggagttgatgaagcaaaaacaaaagggataaatgttattaatacaatccaacttgaaattataaaaaaagtagaggcaaaacatgaaattgaccaatctgcaattgctaagaaaaaaattatagatcaaacaccagatgcaactgaagaagaaaaagaagtagcaaaacaaaaagtagatgaagaagctacaaaagcaaaagataatattgatcaagctacaacaaatgatgcagtggatcaagcaaaaacaacaggaaatacagagatcaataatattcaaccagaagtggttaaaaaatctttagcaagacaagcaattgatgaagtagcgaaagtaaaaaaagaaaaaattaatcaaatgctagatgcaactgaagaagaaaaagaagcagcaaaacaaaaagtagatgaagaagttataaaagcgaaaaataatataaatcaagctacaacaaatgacggtgtgaataatgctaaaacaactggtaaaaatactattgaaaatatacaaccagaagtagttaaaaaagctgaagcaagaaaagcgatagatgaagcagcaactcttagaaaaaatctaattgatcaagataattcgacaacaaaagaagaaaaagacatagctaaacaaaaaattgatgatgaggttaataaagctaaaagaaatgttgatcaatcaataaataattccaatgtagatcatgcacaaattaatggtataagtgcaataaataacattaatgcggtagctttgaaaaaaacacaagccaaaaaatctatagatgatgaagtaacagcaaaaaaagcagaaattgatagtaatcatgaagcaacgaatgaagaaaaagaaatgacaaaacgtaaagtagatgaagcagcaacaaaagcgaaacataatgttgatcaatctacaacgaatgatacagtagatcaatcaactcaaattggaatttcaattatatctaatattcaaccagagacaatacaaaaatctttagctagacaagcgatagatgatgaagcaacaattaaaaaagcagaaattgagaataatcacaatgcaacaaaagaagaaaaggatgtggctagacaaaaagtagatgaagaagttataaaagcaaagaataatattgctcaatctacgactaattctgatgttgaaatagccaaagaaagtggtaaacatgctattgatgaaattcaaccagaaatagttaaaaaatctgtagctaaacaaactatcgacgaattagctaaacaaactatcgacgaattagctaaacaaaagaaagcagaaattgatcaaacaccaaacgcaacaaaagaagaaaaggatgcagcaaaacaaaaagtagaagaggcagtaatgagagctaaaaaactgctcgaaggtgccaatactaactcagatgtcgatcagactacagagcaaggtaaacaatcaattaatagtattcaagttgaagttattaaaaaagcagatgctttatctaaattagaagtggaattacaaaaattaaaagataaagtatcatctgatcaaacatttacaatagatgaaaaactattcataaaacaaaaacttgatggatcatataaaaaagcagaagaaaaagtaaaccaagctcaaactaataaacaagttgataatataaaaatacattatcttcaagaatttaataaaatagttctaatcgacaaagtaaaattgaaagctaaatctcaaatctttgatgtagcaaataaacgtaaagcgtatattaaaggattaacaaatatatcagaatataatagaaataaagcttataaacaaattgatgtttatgttatgaaagccttaaataaattagctgaaaatgtgactactaatgatattaatgaattaacgagagtgactattaatgagattgaacatgtgaatgttaagcaatttgaaaataactttggattggttaatgacaacaaagttacatttaataattttaataataaatttaatgtgaataataatcattcaaaattaaatactctaccttatacaggtgaaaatgaaaactcattattatctttagctgagttcacattattaagtggtctgctattattattaaaacgaagaaaaaaagaagataaataataaaaaataaattcagttatcttcgtattcaaaatatgaaataaaaaacactccaaaagttataattttacttaacttttggagtgttttttatttttaagtatatataaattgtctagcttcgcttccagcgacgtggccggtaactaaagcacttgtaatattgtagccgcctgtatacccatgaatgtctaatacttctccacataaaaataaaccaggttgaatttttgacatcattgttttaggccatatttctttaagagaaacgccaccacccgtaacaaatgctctttcaattgaaagggtaccattaacagtgaaaatgaattgtttgaaatgttctgcgaggtgagtcaactgtggatttgaaagatgatgaaatgttgtattttcattaatatcagcctgttctagcataaacaataaatatctttcttctattaaaccacgcagtgcattttttatatatttgtctggttcttcgcttaagattttctttattttattttctaaatcttgtaaagaaatctctggaaatacatctaattgtaattgtatgtcttgttttttctgatttttttgttctttataaacgaattggctacaacgtaatgcagctggtccacttacaccaaagtgtgtaaaaatcatatccatttgatgactaatacgttttttaccatttttctttaaaactgataattctacattttttaaacttaagcctttaagtgttttatttttaataaaagattcactagatgtaataggaacttcagtagggaataattcagtaatagtgtggcctagatttttagcaaatctgtagccatcacctgtggatccagtttgggggacgcttgttccaccagtcgcaataataactgtttttgattcaaattcgccatcttgtgtttttactataaaagattgatcatttttagaaatgtcattaacaacagtttcttctttaatttcaacgttgttattcttaattgtattaactaaagtatcaacaatatcttgtgatttgtttgaaactggaaacattcttccatgatcttcttcttttaattttataccacgactttcaaaaaattctattatggattcgttatcaaattttgaaaatggactatataaaaatttaccatttcctggtatatttttgatgatttcttcgtaaggtagacgattagtcacattacatctaccaccaccagaaatttttaattttcttccaagaccttttttcttttcgattaatagaaccttactactattttcactcgcagcaactgctgccattaatccacttggtccaccgccaatgattattgtttgatacatatattaacctccgttatcatacatctatattctacataaatacttattattttgcgaactgaagtagaagtttgccttaaaaagtgtattaaatacataaataaaagaacttacaatatttttagttaataatagtgagaataattgacaaaaaaacttaaaaagaaacgagaaacaataagtattttgtgatatattttatagtaatgcaagtccttagtttagacagatgtataacgacatagtttgattaaattaaagataggaagattgaatatgagtgaaaataaggaaatggtgcgcggaacctttttgataacatttagtattttaattactaaaattctaggtgttttatttgtaattcctttttatgcgattatgggtgcaaatgcggaggaaaagttagcgccatttaactatgcttatgttccttataatattgctattgctgtcgcgacagctggagtgcctttagcagcttcaaaatttgtagcaaagtataatgcaataggagcatatagagttggacagaaactctataaatcgagttttatcgtaatgtcgatatcaggtattataggatttttaatattgttttatttagcacctgatattgcagttattactttaggtcaaaaagaaggaaaaggtggatggacagtaccagagattacttggattattcgtatcatcagtatagtagtggtttttatcccactattagcaacatggagaggggtattccaaggttatcaatcgatggggccaactgctgtatctgaagttactgaacagttagccagaattatatttatattaataggtagttatttagttttaaatgtttttcatggtacatatttacaagccaatggtgtagctacattcgcagccgctgtgggagcaattgcaggtttatttactctttggtattactggaaaaaacgtaaacctcacattcaaaaaatggtagagtctgatcgtacaggattagacatttcttatggaagaatgtataaagaaattattgcatacagtattccgtttgtaattgttagtttaaacttcccattatttaaccttgttgatcaatttacacataacaatgcactagatgcagcaggattccatgcaaataaagattatttctttacgatattaaactttacaaccaataaaattgtaatgattccaacatcacttgcagcaggttttgcggtaagtttaataccatatattactaaaacatatgcagaaggtcgtttaactgaaatgcatcgtcaaattaaaacatcaatcggtgtattaatgtatattacagttccagcaagtttagggataatggcactggctgcacctttatatacagttttctatcaatataatccagatggaaacaaaatgttatttatctatgcccctgtagcaatattaatttctttacttagtgttactgcttcgatgttacaaggtatagacaaacaaaaattgacagtgtttgtaattttaggagccgttgtattaaagttagcacttaatattccattaattatgactttccatactgcaggagcaattttaagtactgctattgcattgagttttgcgattacagcaaatttctttattttaaaaatatatgcgaaatatgaatttacagaaacatttgtgcaagtagcgaaaatttttatttatagtttaatcatgatgattagtgtggaaattgtttacttaattttaggtcattttgtccctgtagaacgtaaatttggagcaatgattatattactcgttggggttattgtaggtgctttagtgtatggtagtatcacaattaaaaatcgattagctgatcaatttcttggtgaattaccagaaaaaattagacgtaaagttggatttttaaaatgagattagataaatttttatcgaatatgggagttggcacgcgtactgaggtaaagcagcttttaaagaaaaatagtgtcaaagttaatgataaagtggaaaaatcacctaaataccaagtgaatcctgagcaagatgaaattactgtagatggcaaaataatagagtatattaatcatgtttatattatgttaaataagcctaaaggatatgtttctgctacttatgatgatataaatcaaacagtgatagatcttattgctgattaccgccatcttgatatatttccagtaggcagactagataaagatactgaaggtttattacttattactaatgatggacaatttaaccataatttaatgagtccatctaaacatgtgtctaaaacttataaagtaacctctaaataccctattaaaaacgaagatattattgcttttaaaaatggaattgaattatcagatggcaaagtaaaaccagcacaacttgaaaaactagatcataatttatctttagttactatttatgaaggaaagtatcatcaagtgaaaagaatgtttcattcaattgataatgaggtattagaattaaaacgtcttaaaatttctaatttgacgttagatgaaaacttaaaatctggagagtatcgtttactaacttcagaagaattaaaacttttatagtaataaaagagaaaaggggtaatatgatggctaaacgtgcaggtttattaagaattgtggcaggaattggtgcagcagcagctgcagtagcattatcacgtgaaagtagcagaaataaattaaaagctgagtataataaatataaagaaaatccagaaggctataaacaaaatgcgaaaggactagttaatgatattagttcaaaagcaaatgaaacaattcaaaatgtaaagaatgacccacaaggttatgcaaatcgtttaaaaaatgatcctaaatctttattacaagatgaaaaatctaaattcactaatgtgaatactaaaaaaaatgacacacatgaattagcagaaggtaaattcgatgatgaaggtggcgcaactgttaataataatttaagagtagtcactgaagaagatttaaaaaacaatcataatgccttagatgatagacattaaatttaaattttaaagaagtgagaaaattttttctcacttctttttttatatactatgaaattttctgacatcttgttgtcatttaatactagatttatgtaaaataataggtatatctattgaaaaggaagttgatctctaatgtggaaagaaaaagtacaagaatatgaaagtcaaattattgaagatttaaatggattactttcaatcaagagtgtgagagatgataatcaagcttcagaggaagcaccagttggtcctggccctcgtgaagcgcttgattatatgtataaaattgctcaaagagatggtttttctacccatgatgttgatcatattgctggaagaattgaagcaggtcaaggtgaagatgtattgggaattttatgtcatgtagatgttgttcctgctggagacggttgggactctgatccatttaaacctgttgtaacagatgatgctattgtggcaagaggtacacttgatgataaaggtccaactatcgcagcttactatgcagttaaaattttaaatgaaatgaatgtagattggaaaaaacgtattcatattattattggtacagatgaagaatctgactggaaatgtacagaaagatatttcgaaacagaagaaatgcctgctttaggttttgcaccagatgctgaattccctgctattcatggagaaaaaggaattacaacatttgatttagtccaaaatgtaagctcacctcatactgatcattcagaagcaacacttctttcatttgaatctggtcaacgctataatatggttcctgatcatgctaaagcacacattttggttgaaaaaaatatgacagacgtagttcaacatttcgaatattatctagaccaacaacaattagaaggtgaagcggttgtagataatggtgaattggtattaactgttgaagggaaagccgtccatggtatggatccttcacttggtatgaatgctggtttatatcttattgacttcctatcaactttgaatcttaatcaaactgcaaaagaattcgctgaatttagtaatcgttatttacatgaatctcattttggcgaaaaaatgggtatgaagttccatactgatgtcatgggagacgtgacaacaaacgtaggtatcattacgtatgataaagaaaaaggtggcaaatttggtatcaatttacgttatcctaaaggcttcgaatttgaaactgctttagaacgttttaaaaatgaaattaaatctcaagggtttgaaatagaattaggtaaagttcaacaacctcattttgtagataaaaatgatccatttgtacaaaaacttgtcactgcttatagaaatcaaacgggtgatatgacagaaccttatacaattggtggaggcacttatgcacgtaatttagacaaaggtgtcgcatttggagctatgtttgaagattcagaggatttaatgcatcaaaagaatgaatatattactaaaaaacaattattcaacgcaacaagtatctatttagaagcaatttattcactatgtgtggagggataaataatgacaaaagtatttattaacggagaatttttaaatcaagaagacgcaaaagtttcttatgaagaccggggttatgtatttggagatggtatatatgaatatattcgtgcatacaacggtaaattatttacagtaactgaacactttgaaaggttccttagaagtgcgagtgaaattcaaatcgatttaggttatactgtcgaggagctaacagatattgtaagacaacttttaaaaatcaatgacattcaaaatggtggaatttatattcaagcgacaagaggtgtagcaccaagaaaccattctttcccaactccagaagttaaacctgttattatggcatttgctaaaagttatgatcgtccatatgacgactttgaaaatggcattaatactgtaactgttgaagatattagatggttacgttgtgatattaaaagtttaaacttattaggaaatgttcttgctaaagaatatgcagttaaatataacgcaacagaagccattcaacatagagaagaaactgttactgaaggtgcgtcaagtaatgtgtatgcgattaaagatggcgaaatctatacacaccccgttaataattacattttaaatggtattactcgaaaagtaattaaatgggttgctgaagattacaacataccatttaatgaagaaacatttacagttgatttcttaaaaaatgcagatgaagtcattgtgtctagtacttctgctgaagtaacacctgtcgtaaagattgatggcgaaattgtaaatgatggtaaagtaggtccaattactaaaaaattacaagaaggattcgaaaaatatattgaatcaaaaagtatcaattaactttaaatttcttcaacgatgatgtatatgatatgttataatatttataaagcattcgggattttagctttttcatactagtaaaatgtatcattttgtttctcattttcagttgaaaaatcaagctaaaaattataaaatcatcattgagtgattaaagagataaggtaaaaaattcaaataatttggggacatttaaataataattttaccattataacaaaaacaaagttagaaatataatcgttagataaaaagcgatgattaaattagatatatggctcttgaaaaactatatttctcgagccattttctagttgaaagtgaggtgaacgagttggagcagttttatcaattagggtggacgcttgattctgcaggtggagcatctggagaggcgtatatggctgaacaagatggacaaaaattatttcttaagcgtaactcaaatccatttattgcagcattatctgcagaaggtattgtgcctaagttagtttggacaaaacgtattgaaacaggcgaagttgtaacagcacaacattggaaaaatggtagagaacttacatcatcagaaatgtctcaaagaagagttgctgaacttctcaaaaaaatacatggttcaaaaccactacttaatatgttaaaacgtatggaaatggaacctattaccccaaatattatgttaaagaaaattaatgcttctttatctagagacgtattaacccatcatattattcgaaaagcattaacttacttggaagaccatattcctaatttagattcacgtttctttacagtagttcatggtgatgttaatcataataactggttactttctgatcgtgatgagctatttttagtagattgggaaggtgccatgattgctgatccagccatcgatattggtatgctgctatacaactacgttccaaaacaacaatggtctaactggtttaatacttatggtgttaaagaaagtatggacttaaataaacgtatgaaatggtatactgtgattcaatcaatcggcatgattcaatggtatgaagaacaaaaaagatttaaagatatgaacacatggctcaaatttttaaatgaggtaatgaatagtaatttatttatttaaggagatttaatacatgagagtccgttataaaccatgggcagaagattatttgaaagaacatcctgacctagtagacatggatggttcacatgctggcaaaatgagtgattggtttgataagaaacagccaatctatattgaaatcggttcaggaatgggacaatttataactacacttgcagagcaacatcctgaaattaattttgtttctttagaacgtgaaaaaagcgttatgtataaagtgcttgataaagtaaaagataaaggacttacaaatttaaaaatgatttgcaatgatgcaattgaactaaatgagtactttaaagagaatgaagtatctagaatttatttaaatttctcggatccttggcctaaaaaaagacatgcaaaacgtcgtttaacgtatcgaacttttttagctttatatgaacaaattcttaaagaagatggagaaatacattttaaaacagataatagaggtttatttgcttatagtcttgaaagcatgtcacaatatggaatgtattttacaaagttaaatttaaatcttcatgatgaagatgatgaagataatatattaactgaatatgagaaaaaattttctgataaaggttcccgtatttatagaatggaagccaaatttcataaaaattaataaataatatattaaatccaacacacgagcgtaagaagaaaatacattcttacgctcgtgtgttgttttatcatttattgctctttatgatacatataagtacatatgtgctaaatacattgttatttaaatttatggataagtacatatgataaacatccaatgcaatatgtaagaaaaaaagaaaaatttagtccatatttcatccaaaatgattattgatttttgtattatcatagtaatcgttactttactgttaagttcgaaaatgataaaaaattaataaaaacatcaaacaaatgtaatttaaaatataaatatgaagtgaaaaaagtattaaaatattttttaaatatcaaaaaataatattaattttcttcaatagtaagtatttcacctgtgtgtgcatcagcatagaaggtatactctatatcacggttgtttttattttgagtaataccaccttgataaacaaaacgatttaaatattgctctttattttgcaaaggttcatgaagaatgtaagaacctttaatatccataaaatatgattttacttcctctaatattctatccggattttttacttttttgtttttcaatgtatgatagagtataaaagccgtagatgctcctatagttattacgatgggaatggagatatattttatagtttgacgagtcataattatcgaatctaacctttctattaatagttcttattattagtttaccataatcaaaatgatataataaatttaaggagtgtgtttatgtaatggaaaatgataaaactttacttcgtataaaaacattaacagaattacatggagcgccaggctttgaagaagaagtacgtgactacatgaaaaaagaaatgaccccatttgtagatgaagtgataaccactcatatgggaagtgtttttggtataaaaaaatcaaaaaaacaaaatgcaaagcgtgtgatggtagcggctcatatggatgaaattggctttatgattacgaacatcactcaaaatggcatgttacagtttactaacttaggcggtgtatctaatgatatatggcaaggacaacgactgcaggttaaaaatagaaatggtgaaaaaattgtaggcgtcgtttcgaatataccaaaacattttagaacaggtaatgaagcggttcctgagattaaagatttaatgttagatataggagcagaaagtgataaagaagttcgatcacgtggaatagaaataggggacacaattgttccttttacaccattcactcaattatctgaacatcgatatagtgctaaggcatgggataatcgttacggttgtgtcttagcaattgaaatattagaattactcaaagatgtagaattagatgtagatttatatgtgggtgcaaacgtccaagaagaagttggattaagaggtgcgaaagcatcaactgaattaatacaaccagatatagcattcgttgtagattgttctcctgcaaatgatattaaaggtaagcagcaattatctggtcaattaggtgaaggaacattaattcgaattaaagatggtacgatgattctctctccacgtttcagagactatctactggagttagttgatacatttgatattcgttcacaatattatatttcaccaggtggtacagatgggggagaaatccataaagcaaataaaggtgtacctacagcagttataggtgtatgtgcacgatatattcatagtacagatgcggtatttgatattagagattattatgctgcgcgtgaattattaaaacaagctgtgagtcacttaacaaatgaaaacattttaacattacaatttcaaagtgaggagaaataatatgattacattagaaactgaaaaacaatttgaagaattaaaaaatgaacaaacggtatttgaatttacagctggatggtgtccagattgtaaagtgattgaaccagatttaccgaaattagaaaaaaaatactctaattttaaatttgtatcagtagatcgagataaatttatagatttagcaattgaaaatgatatcatgggtattccaagctttctcgtatataaaaatggtgaattaatgggaagttatattggaaaagaacgaaaatcaatcgaacaaatagattcatttttaagtcaatatgtgtaaatgagtaattaggacttaaattttcttatctatatgaaagaatagcctaatttttctgtaattgaagctctttttattgtaaaatattgtaaggtgcgaaaataggagtgttttaatatgaacgtctttcaaatgagagatacattaaaacaacgtttaaagcatttagacgttgattttaagtttgatcgtgaagaagaaacattacgtatatatagacgagataattttaaaggcgtaactatcaagcttaatgcaattgtagcaaagtatgaagaacaaaaagagaaaatcattgatgaaattatctattatgttgaagaggccattgcgcaaatggatgataatggtctatctaaagtgaaagatattcaagttatgcctgtaataagatcaactagttttgataaaaaaactaaagaaggtcatcaatttgttattgaagaacatactgcagaaactaatatttattatgcacttgatttaggaaaatcgtaccgattaattgatgaaagtatgttaaaaacactaggtttaacttcacaacaaattaaagaaatgtcgttgtttaatatacgtaaacttgagaataaatataaaacagatgaagtaaaaggaaatattttttattttatcaattcaaatgacggatatgatgcgagtcgtattttaaatacaaaatttttaaatgaaattgaagctcaatgtgaaggtgaaatgttagtcgctgttcctcatcaagatgtattaattattgctgatatacgcaataaaacaggctatgacgttatggcacacttgacgatggaattttttactaagggacttgtacctataacgtcactttcatttggttataaaaaagaacatttagagccgatttttattttaggaaaaaataataagcaaaaaagagatccaaacgttattcaacgtttagaagctaatcgtaaaaaatttaataaaaaataactaataatacgtcaaaaggagaatttaaatgaatttattttataataaagaaggcgtaggggacgttgcatttttacaaattgaaccaacagatgggccttttgaatatgaaataaaaaataatgtggttgctattaaacatgaaaatcaaattgttggatttaatattttcgatttttcaaaagtatattcagttaatagtaatggtcatattaaattaaatgaaacgcttgtagaagctatacagcaatcaattacaaatgcaggttttgattatcaacttgaagcggatttatcacctaaatttgttgtaggctatgtagaaactaaagaaaagcatcctaatgcagataaattaagtattttgaaagttgatgttagtagtgaaaaactacaaatcgtgtgcggtgcgccaaatgtagaagcaggtcaaaaagttgtcgtagctaaagttggtgcagttatgccaagtggcatggtaattaaagatgctgaattacgtggtgtggcatcaagtggtatgatttgttcaatgagagaattgaacttgcctaatgcacctcaagaaaaaggaatcatggtattgtctgatgattataaagtaggcaatgcattttttgattaaaaaaactaggaaggatgtggatgtatgagttggtttgatgaattatttggcaatgataaacattctgatgaagaattactaagacgaaaaaataaacgtcgacataactcagaaacacaaaagaatggtgagcataccttacttcctgaaaatgatgatatctatgatcgtccgcgtggaaaatttcgttttcctattgatttagggcaagatgctgaaacatatgatgaagcggtttacagagaagttgatgaagatgaatatatgtcgcagaaatcatctaaaagtgataaagaatttggttatgacgcttatagttatgatgaaatagataataatgactatcctcaaacttatgatagtgcaacagatactcgaagacgcagaagaagacagtatacaaatcatgatgatactggagtgccttcaattaaagaaagaccttctaataaacgtaataagtcgttgaatagtgcacaattaaatgaaaacaataatagaaaaacgacttctcaatatcataagtatacaaataatcattctcatgtgaaattacaatcggagcgttttaaatcaaactataaaacgacatcgaattctacatatcaccattcaagctttagaacttcagaagtaccatctgcagtatttggtacaaaaaaacgccgaccaattgaaaatggtgttatccctccattaaaagagaatgaaaatgatgataatcataatgacgataaaaataattcaacacaagatcaaacagcacaacgagtatctgataatgatgtaaaaacaaatataagcaagtctaaaaatgaaccgttgaatcaaactaagtatgaagatactgatgtttcaattattaatgatcaaaattctaatatttatgaaactacatcttcaaaaagtaaagttcctaatttttctcaaaaagataatacggtgaatattgagaatatttatgcgtcacaaatagtagaagaaattagacgtgaaagagaaaaaaaagcacaacaaaaacgtaaatttaaagaagctttacagaataagcgtcaacaatcatcggatagtgataacgaaatccaaaaagtcattgatgaaatgtatgcaaatcaagctaagcagtacactggagagagttctctagatcatgaagaaaataatgatgaagagagaacgacacatacagaagatagtactgataaaatggaagacacaaatgagaatactacggataatcatgtgattgatgaaaggactcaaactgattcaaatacgtctaattatgatgacgatgacgagcagtatcaatatgaagaaattgatttgaaatctgtcccaaatattcaaactgttaatgataaagatgtagaaatacgagaagttaatgatacgacatctacagacgaacataatgatgatcaattgtcagaagataatcttaacgtagcacctatacattcaactaaagataaacatcatcattttaataaaaatgaagatgctcatttaagtaaagttaataaattgcaagaagataattatacttcaaaagaaaaagtagaggaagcaaagtatcatgagatgaacgtttcttcgaatgaagatataactaaacaatcaaatcataacgatgatgacattgaccattcaattgataatgcaattgaaacagatactgagtatgcttctgaacaagttgaacataacaatgattcagttcatgactcatcatctaacactgaaggggaaaaattagaagatgatgacaaacaaatcgttgaaaatgaggatgtttcatcatctattaaatcttcaatcattccgggtagtaaaccttttaacgttgtgatgacgccatctgacaagaagcgtttgatggatgctaaaaaattcaaaaaatctaataaagttaccgttccagaattaaaaccagaaacaaaattggaacgtaaatcagttagtataccaagttcaagtccatcagtaaaagcgactaataatcatgaagagcatattaaaaagaatattaatgaacaatcacttcaagataatcaagaagatgaaacgagtgaactttcaaatgtacaaaatgaaaatacacaagccatatctatgacattaaatactcagaatgaagagcaagatgaaaacgaacaacacgaaagtaaagctacgattagaaaaggccctaatattaaattaccaagtcttgaattattagaagatccggaaattcatcaaattgataactcatggattgaagagaaaaaacaagaattaaatgatgcgttttattactttaatgttcctgcagaagttcaaaatgtgactgtaggtccaagtgtaacacgatttgagttagctgttgaaaaaggtgtgaaagtttcgagaattactgctttgcaagatgatttaaagatggcattggccgctaaagatataagaattgaagcacctattccaggtacaagcttagtaggtattgaagtaccaaaccaaaattcttcaaaagtaagtttaaaatcaatcttagaatcacctaagtttaaaaatacggaatctaaattaacagtggctatggggaatcggattaataacgagccattattaatggatattgctaaaacgcctcatgctttaatagctggagcgacaggttcaggtaaatctgtatgtattaacagtatattaatgtcattattatataaaaatcatccagaagaattgagattattattgattgatccaaaaatggttgaattagcgccatataatgacttaccacatcttgtttcaccagttattacagatgttaaagcagctactcaaagtttaaagtgggctgttgaagagatggaaagacgttataaactgtttgcaaaatatcacgtacgtaatattactgcttttaataaaaaagcgtcttacgaacaacgtatgcctaaaatagtcattgttattgatgaattagcagatttaatgatgatggctccacaagaggtagaacaatctattgctagaattgctcaaaaagcgagagcatgtggaattcatatgttagtagcaacacaaagaccttcagttaatgttattactggacttattaaagctaatataccaacccgtattgcatttatggtgtcttcaagcgtggattctagaactattattgatagtggaggcgctgaaagactattagggtatggtgatatgctatatttaggtagtggtatgaataaacctatacgtgtacaaggtacatttgtctctgatgaagaaattgatgatgtcgttgatttcatcaaagcgcaaagagaaccagaatatttatttgaagaaaaagaattattgaaaaagactcaaactcaagcacgggatgaattatttgatgatgtttgtagttttatggtcaaagaaggacatatatctacttcattaatccaacgacatttccaaattggttataatcgtgcagcaagaatcgtcgatcaattagaacaactagattatatatctggagcaaacggctctaaaccaagagatgtatttattactgaggcagatttaaagaaagattaattttaaaggagttttatggatatgacgcattatcattttgtcggaattaagggtgcaggaatgagttcattagcacaaattatgcacgatttaggacatgaagttcaaggttcagatattgaaaaatatgtatttacagaaggagcacttaaaaataaagggattaaaattttaccatttagtgtagataatatacatgaaggaatggtagttattcaaggtaatgcatttcctgatacacatgaagaaattgttagagcacatgaattaaagttggatgtgattagatatcatgattttcttggtcaagtcattaatcaatatacatcggtagcagttacaggtgctcatggtaaaacgtctacaactggtttattatctcacgttatgaatggagacaagaaaacatcattcttaattggtgatggtacaggaatgggtttaccaggtagtgattattttgcatttgaagcgtgtgaatatagacgtcactttttaagctatcacccagattatgcaattatgacaaatattgattatgaccatcctgattattttaaaaatatcgacgatgttgctagtgctttccaagaaatggcaaataatgtaaaaaaagctattattgcttggggagatgatgaacatttaagaaatttaaaagcagatgtacctatttattattatggtcttagtaaaaacgatgatgtatatgcagataatatacaaataactgaaaatggtactcagtttgatgtgtatattaatggagaatactatgatcaatttttaacaccacaatatggtaatcataatgttcaaaatgccttagcagtcattacaattagttatcttgaaaaaatggatgttaataatattaaagaagctttagaaacatttggtggtgtaaaacgtcgctttaatgaaacttttgtttcaaaacaagtattagtagacgattatgctcaccatccaagagaaattagtgctacaattgaaacagcacgaaaaaaatatccaaataaagatgtcgttgcagtattccaacctcatacgttttcaagaactcaagctttcttagatgaatttgctgatgcattaagtaaagcagaccacgtatttttatgtgaaatttttggttcaatacgtgaaaatactggagaattaactatccaagatttaataaatcgtattgacggatctgcgttaatcgatgaaaatagtattgatgtattagaaaaatttgataatgctgttattctatttatgggcgccggagatattcaaaaaattcaacgtgcttatgaagaaaaaaatggtatgtcaaaagaattctaatatgtttatatataattattatgggtatttataattaatgacttttattttaaaagaatatttaggaggcgttttttatgcattggattttaccaattgctggaattattgctgcaatcgcattcttaattttatgtattggaattgtcgtagttttaatttcagttaagaaaaatttagatcatgtggctaaaacacttgatggtgttgaaggtcaagttcaaggtattactcgtgaaactactgatttacttcataaagctaatcgcttaactgaagacattcaaggtaaagttgaacgtttaaactctgttgttgatggtgttaaaggtattggcgactcagttcaaactttaaatagctcagttgatcgtgtaactaactcaatcacacataatatttctcaaaatgaagataaaatttctcaagtagttcaatggtcaaatgttgcaatggaaattgctgacaaatggcaaaatagacactatcgtagaggaagtgcaaactacagagctaactctgtagctaatgatgcaaatcaaaattacactacaaacgttgagaaaaacttttaatatgattcaatcaaatgcacttaaatgaggtttttacttgtttaagtgcatttcttataggaggaataaatatgagtaagaaatataatcgtgactcatttgagacgaacaacactagcaatgatttacatggtagaggtgcgaatcaacaagaagacgtagcgcaaagtagtgcgacaaaacactacgatagagatgcatttgaaacgaacaacactggtaatgatttacatggtagaggtgcgaatcaacaagaggacgtagcgcaaagtaatgcaacaaaacactacgatagagatgcatttgaaacgaacaacactggtaatgatttacatggtagaggtgcgaatcaacaagaggacgtagcgcaaagtaatgcaacaaaacactacgatagagatgcatttgaaacgaacaacactggtaatgatttacatggtagaggtgcgaatcaacaagaagacgtagcgcaaagtagtgcgacaaaacactacgatagagatacatttgaaacaaataactcaggtaatgacttacatggtcgtggcgtaaatcaacctaatggtgatgtgtacacaaatgcgacaaaacattacgatagagatgcatttgagacaaataactcaggtaatgacttacacggtcatggtgtaaatcaactagatcaaaacaactttgttaatacaccacattataatcgtgatgactatgagagttataatcatccaaaattctcaaatcaagctgctagtgatactaatcaagagattgattataaaacttattataacgatccgagatttaagtctcgtaaacattttattgttagctttattactggtgcaatcattggctcaactattggacttttaactaaaaataaagcaaaccaaaaaattgaggatttaaaagcaaaagaacaagaagttaaagataattattatagtattaaacaacaaacagaagaaacaattgataatgtaagacataaaattgaagacttaaaaaatagaaaaaatacaagtatttcttccgatgagcttgcagcacaacgtcgagcaattcaatcagaaacatcaagtaatttagcagacgaatcaccacaagcgcaagaaatacaagaagccaaaaaagaagcaattgctaaagatgaaaaacaagaagaaacagatgcacttacagcacaacgtcgagcaattcaatcagaaacatcaagtaatttagcagacgaatcaccacaagcgcaagaaatacaagaagccaaaaaagaagcaatcgctaaagatgaaaaacaagaagaagcagatgcacttgcagcacaacgtcgtgcagttcaaaatgaatcagaaataaatcaattatctaatccagcaagaagtcatcaaactcaaaacagcgaaaatgaatcacaagcttctaaaattgcatcggcagctagaactaagcaagctaagttaaaagataataaagatgtagcaagtaatactcaaaaattatttgaggaggcaccaataacatcttctaaatatgataaagtgcctaatttgataactaaaaatcataagtcatttaataaagatgaagaaataacaaaaaataaacaaactcaccatgatgctaaatttgaaaaaggagttattactcaccaacatcaaccatctcaatcaaattcaaatcaaaaaaataaaaaacataatcaaaaacgtaaaaatcagaatcaaaaaaatcaaaataaaaacaaaacgccaaagcaacaacaaagagctgaaaaagcaaatagtaaaatagaaaaacgtacatttaatgattaatatttttaaaagagcagtgtaatattttacattgctcttttaattctttatatagtattattaattatattatttttaataattcagaaatattagaaaatttattcgatttatagttgaacatttttaatgtaattgttagaatactatctaaatacaattattttaccgctttaaagtaatataattcagtatagtaaaatttattgaggtgagtatgaatgtctacaaagttagaacaatacagggaagagataatttcaattaataatcaaattctagacttattatcaaaaagaggggaattagctcaaaaaataggagaagaaaaaattaagcaaggtactaaagtttatgaccctcaacgagaaaaagaaatgattaatgaattaatggatcgtaataacggaccatttaatgataatgtaattaaacaattgtttaaagaaatctttaaagcgtctactgatttacaaaaatcagaaaatgaaaaacacttatatgtttcaagaaaattaaaaccggaagatacaattgtaaaatttgataacggtggagttattggtgatggaaataaatcatttgtatttggtccatgctctgttgaatctcaagaacaagttgatgcagtagctcgtgatttacaagccaaaggtgagaaattcattagaggcggtgcatttaaaccaagaacatcaccatacgatttccaaggattaggaattgaagggcttaaaatattgaaaaatgttaaagataagttcaatcttaatgttgttagtgaaattgtaaatccagctgatttcgaaattgctgatgaatacttagatgtcttccaaattggtgcaagaaatatgcaaaattttgaattacttaaagaagctggacgtacaaataagccaatcttattaaaacgtggtttatcagctactattgaggaatttacatttgcagctgaatacattgcttctcaaggtaataaaaatattattctatgtgaacgtggtattcgtacttatgaaaaagctactcgtaatacacttgatatttctgccgtacctatcttaaaacaaggtactcacttaccagtaatggtagatgttacacatagtacaggacgtaaggatattatgttaccgactgcaaaagcagcacttgcagtgggtgcagacggagtaatggcagaagtacatccaaatccatcagtagctttaagtgatagtggtcaacaaatggatttaaatgagtttgataaattttataatgaattaaagccattagctgacatgtacaactctaaacaacttaaataaaacatcatcctttaatttactagctattcattttactaaaatttagggcaatatagaaagttttatatttaacttctatattgttcttttttagttaaaacgaatagttttattttgattttattaaatctattaactaaaatttgacacaattgtgaatataagtcttatatatttgacacattaccaatttatgataaactttgaaaatgaaatgaaaacacgtaataataataaatgaaacgcttacaaggaggaaattatgacggtaactatatatgatgtagctagagaagctcgcgtatctatggcaactgtatcacgagtagttaatggcaatcaaaatgtaaaaccagaaacacgtaaaaaagtaaatgatgttattcaaagattaaattatagaccaaatgctgttgcaagaggactagctagtaaacgtacaactacagtaggcgttattatacccgatatctctaatatttattattctcaacttgctagaggtattgaagatattgcaacaatgtataagtaccactctatcatttctaattcagacaatgatccagaaaaagaaaaagaaatttttaataatttgttaagtaaacaagtagatggcattatctttttaggtggtacaatttctgatgaaatcaaagatttaattaatcatacttcagttccagtagtagtatctggaacaaatggtaaagatgacaatatcgcatctgttaatatcgattttgctaaagctgccagagaagttacagaacaacttattaaaacaggcgcaaaagattttgtacttgtaagtggagattattctaaaaaggctcaagaagatgtactaagtggtttaaaggatgctttaaacaaacatcaattaaagttaaataacactatagaattatcaggttcagaaagctataaagacggagtgaatgtctttgaaaaattaaaaaataatttgcctgatgctatattatctattagtgatgaacaagcaattggtattttgcatagtgctcttgatgctggaataaaagttccagaagaactacaaatcgttagttttaataatacgcgtttggtagaaatggttagacctaaactatctagtgtcattcaaccattatatgacatcggggcagtaggtatgcgtcttcttactaaatttatgaatgaagaagacattgcagaacctaatgtagttttaccacatagaattgaatatcgaaacactactaattaaagtaatgtgaaaaaaaggataaaatcaaaattttatccttttttaatatataagttactataataaaattatgtaaacctttttaatattgctaaattaattataaataaaattaaatttttgtaaacgctatcaagtattcgacatatatttatttgttagttattataaagtagtaagatggtttggtagttatttctaaatatcttattacataaaatttattttaaacaaggggttgaaataatttggcacatttatcagatttagatattgctaatcaatcagaattaaaatcaattggagacattgcgaaaaaagcaggaatacctgaacatgctttagagcaatatggacactacaaagctaaaattgatattaatcaaattcaatcaagagatgaaaaaggtaaagttgtcttagtaactgcaatgagtcctacaccagctggtgaaggtaaatcaactgtcacagtaggcttagctgatgcttttaatgagttaaataaaaatgttatggttgctttgcgtgaacctgctttagggccaactttcggaattaaaggtggcgctactggtgggggatatgcgcaggttttacctatggaagatattaatttacactttaacggtgatttccatgcaattacaacagcgaataatgcattatcagcatttatagacaatcacattcaccaaggtaatgatttagcaattgatgtacgtcgtgttgaatggaaacgtgtacttgatatgaatgatcgtgcattacgtaatgtcatcgttgggttaggtggaccaactaacggtgttccacgtgaagatggtttcaatatcactgtagcatctgaaataatggcgattttatgtttagctcgtaatattaatgatttaaaagaaaaaatcagtcgtattacagttggttatactcgtgaacgtaaaccaattactgttgcagacttaaaagttgaaggcgctcttgcaatgatacttaaagatgcaattaaacctaatttagtacaaactattgaaggaacaccagcacttgtacatggtgggccatttgctaatattgctcatggttgtaactcgattttagcaactgaaactgcacgtgatttggcagatattgttgttacagaagcaggctttggttcagatttaggcgctgaaaaatttatagacatcaaagcacgtgaagcaggctttgaaccttctgcagttgtcctagtagctactgttcgtgcgttaaaaatgcatggaggtgttgctaaagataatctaaaagaagaaaatgtcgaagcagttaaatctggtattgttaatttagagcgtcatgttaataatattagaaaatttggagtagaacctgtggttgctttaaatgcatttgtacatgatactgaagatgaaactgaagcagttaaagcttgggctaaagaaaataatgtacgaattgccttaacagaagtatgggagaaaggtggtaaaggtggcgttgatcttgctaatcaagttcttgaagtcatcgatcaaccacaagaatttaaattcttgtatgatttagatcaatcattagaagaaaaaattgaaacaattgtaaaagaaatctatggtggttcttcagtaacgttcagtaaaaaagcaaaaagacaattaaaagaatttaccgacaatggatggggcaaatatccaatctgtatggctaaaacacagtactcatttagtgatgatgcaaccgctttaggcgcaccaactgattttgatataactatcagagaattagaagctaaaacaggcgctggatttattgttgcattaacaggtgcaattatgacaatgccgggattacctaaaaaaccagcggcattaaacatggatgtcactgatgaaggtcatgcagtaggattattctaatttagattaaagaaaaaacgtttgagacttttactgtctcagacgtttctttgttttaccaacaaatttcatcattttgttggtaaaactgcatgtgaaaagacaagtaatttagcggcaaaaccaattaaaagacgaatttcaggtaatttaaatgatatatcgatattttgtgttattactatcatacatttattttaaaagtcttttaaattcaatactcataaactatttaaattaatataaagtgcgataaaagatattgattgattcattgaggcttagttaataaatgatcataaatagtatattgttttgcctgttgatatgtctttttagtaattaccccttccactagcattcgttttaatacataatgctgacggtcaatactaattttaacttcgttataagccttcaaatcaccattattttcatacggtgtatacgtataaggactttgcaataagccaacaagataagcggattgtgcaacatttaacttggaggggggaacgttaaataaactataggaagcagatgcaattccagttatatttgcaccattataatcgcgtccaaacggtacaatatttaaatatgtataaataatttcatttttagataatattttttcaagacgcatcgctaatataatttcatttgccttacgactatatgttttttcatttgttaagacttgattctttattaattgttgtgtaattgtacttccgccagaacgagaatttaaacttaaaacatcttgtatcattgctcttattaacgcttttggtaaaattccatcatgtttaaaaaataatgtgtcttcagaagatattaatgctttaattacgtttgaatttacatgttttggacctacgatgagagagttttgagaatgatcatactcagttaaaatatttttatcgtgattcaaaatctcatcacctgaaaagtgtagtacgcggtgtttcaattcagtatcacttatatttgaagcttcttgagtaagatgatgaaaataagtagcagtaccaagaacaataagtatagaacctaaaactataatactcaaaaggcctaccataatatgttttataaatttataatttttttcaaacgttttaaattgaatatctttaaataataatttcatggtagtcctcctcaaattaaatacagtatatcatatctagcatatttgacttttagaagaggtttttttataattattatcaattcaatatgtattgaataagaggagaagtaatatataaattaacttaacagagagttagtggatgctgtgaactaacatgtgtttatatatgaatacacctcatacttatttattcaacgtttattaatgagcgtatcattaatagagtaaacaattctatttgaattgttaagtatggtggtaacgtgcataagcgcccttacattgttgtgagggtgcttttttatttaataaaaataaattttataggaggatataactatgtcaaatgcattactagaagaattacaatggagaggtttaatttatcaacaaactgatgaacaaggtattgaagatttattaaataaagaacaagtaacgttgtattgtggtgcagatccaactgctgatagtttacatattggtcatcttttaccatttatgacattacgtcgattccaagaacatggtcatcgtccaatagtacttattggtggaggcactggtatgattggagacccatctggtaaatctgaagaacgtgtattacaaactgaagatcaagtagcaaaaaatgttgaaggcttaagcgctcaaatgcataaactatttgaatttggcacagataaaggagccgtactcgttaataatagagactggttaagtcaaatttcactaataagtttcctacgtgattatggtaaacatgtaggtgtcaattatatgctaggtaaagattcaattcaatcacgattagaaaatggaatttcatatacagaatttacctatactattttacaagcaattgactttggccacttaaatcgtgaacttaattgtaaaattcaagttggtggttctgatcaatggggtaatattacaagtggtattgagttaatgcgacgtatgtatggtcaaacagaagcttatggtttaactattccattagtgacaaagtctgatggtaaaaagtttgggaaatcagaatctggagctgtttggttagatgctgaaaaaacaacaccgtatgaattttatcaattctggattaatcaatcggatgaagatgttattaaatttttaaaatactttacattcttaagtaaagaagatattaatcgccttgaacaatctagagatgaagcaccacatttacgagaagctcaaaaagcacttgctgaaaatgtaacagaatttattcatggtaaagaagcacttgatgatgcaattagaatttcagaagcattatttaaaggtgatttaaaatctttatcaattaaagatatcaaagcagggtttaaagaagtacctcaagttgaagtttctaaagcaacaactaacattattgatgttttaattgaatctggaattgcttcctcaaaacgacaagcaagagaagatgtaaacaatggagcaatttatattaatggtgaaagagaacagtctgttgattacaacttaactgatgaagataaatttgataatgaatttacaattattcgccgtggtaagaaaaaatacttcatggtaaattataaataatcttatctgagaagaatatattgaaaacgaggttaatccattattttggattaacctcgttatttattatcgaataaattgactattattatcttcagaattatatgattgcgaagatattgatttttgatttttaagagtgactgatacgtctttagttttaccatcacgtataacagtcaacttcacggtttcacctggctttttattttgatataagtacgttcttagatcggtatcatcatctacttttttactatctactttagtaatgatatcgccaacttttaattcactagagtggctaacttttgcaatatacacaccagtatcacgatcagtttttaattcttttttataagaatctggaatatcacttaagttaagtaaccctattccaattgaaggacgttctactttaccatgtttaacgagttgttcaattgtaactctaacttcattacttgggattgcaaaaccaataccttcaacttggtcagcagcaattttcattgaattaatacctactaaattaccattaacatctactaatgcaccaccagagttaccgggattaattgctgcatctgtttgtagcacatttactttagttccaccagaagtggtattagattcaattgtacgttcatttgcagaaataatacctgatgttactgagttagcaaattctaagccaagtgggttacccattgcgaaaacactatcgccagtttgaactttagaagaatttgcgaatttcattgctttaattcctttttgagaatcgatttttaaaactgcaatatctgaaactgcatctgtacctacaagctttgcttctacttgtttaccgttatgtaattgtactttaatttgtgatgcaccatcaataacgtgattattagtgacgatataagcagaattgttgttaatttgataaataacaccagaaccgataccggcttcttgtgccttagttgatttaccttgtaataaatcgtcaaaacttgttgccttttgcatattgatgacacctacaatagcaggagaaacatctttgatcatggcattaaccgatttatatttatcacttttaccgtctaacacattgccacctttatcattcgtagcctgttggacttgagatccaccactatttgaatcatctccattcataagtcgattaactcctaaaacaattaatgctcctatgataccagcgattagagcaataataataattctaaaccatggaaacttcggtttaggtggacgtgaatgctgataatcgctggattgaaaatattgattatattctgtcatattaaacctccgtatatattttaaccattatctcaattatgaagaaaatatttaaatatttctagtaaatagctatcagtcttaagatgtatcttttaaaatcttgttcacgtgataagttaatgataaaatcgactaagtgtagaaacttagaagtaggtgacaaaatgtataaatttattagtaaatttttagaattaataatcgtaaaaatggcacgttcattacatattgtaggtaaagagaacattcctaaagatagtaaatatgttgtgacttgtacccatgaaagttataatgaagtgattttattaggattagctttaattccaaatgaaattcattatatggctaaaaaagaattatttagtaataaatggggtggcaaatttttaagatctttaaatgcttttccagtagatcgagaaaatccgggacctagtacgttaaaacaacctgttaaattattgaaagatcataaaacagtaggtatcttcccaacaggtcatagaacttcagttgaaggcgcgcctttaaaacgtggagctgcaacgattgctatgctaggtaaagcaccaatcttaccagctgcttatgttggaccaacgaagttacatggtttagtcactggtcaagcgatgattaaatttggtaaacctatttatcaatctgacatacctaaagatttaaagcgtaacgaaaaaattgattttctaactaaagaaatagaaagacgtacagcacagttacaacatgaacttcatcttattcaagaacgtctttaatagatattgatagcattattcatcagaagattttctaaatagagaatcttctttttttataaataattgataaatggatgataggagtaccatgagtgaaaatgacaagttttaagaaatctattttccgttagtaccatatattacctaacgtatggttcttgttattttgtctttaatcatttttatttagttaatgcggaaagattatttaataaaaaaatagatttgaagtaaaataccagttaattatctcaatcaataataaaaatcatttataatatcttattaaatatatatacgttttaatctttattggttaaagcgtatcttttttattttgtcatcacattgtctatttatataaaataaacatatagcgtaaccgcttacaaatatggtagattatatattggactaaatacataaaaaatataatttttaataaataaaggaggataaaagatgtttaaattctttcaaaatctcggaagatcgttaatgctccctgtagcagttttaccagcaggagcaatcataactgggataggtaacttactaaatgcacttcatgttcttcccacagtagccatgttcttttcaattgtaggaacagctattttaggacaattaggattaatttttgctatcggtgtagctattggtatggctaaaaagaacgatggtgccgttgctttggcaggtgcgttaggatatgccatggtaacgaaagtattaaatccagaaaatgtggctacgttatttaatataaaagaaaaagcagttaacttaggctttacaaaaatggataattctaatgtatttcttggtattattatcgggttaattgctgcatattcttttaataaatttagtgaagttgaattacctatggccttgtcattttttagtggtaaacgattagtacctattatgactgtattttttagtactatattagcagttatactattatttatttggcctatggtcttttcaggcattgttgcatttggagaatggttagtaggttttggttcattcggagcatttttatatggtgtctttaatcgactacttattcctactggtttacatcatgcattgaatgcagtattttggttcgatacagcaggaattaatgatattggtaaattccaaacaggtgtagatgcagtaaaaggtataacaggacgttatcaagcaggtttcttcccaattatgatgtttggtataccagcagcagcacttgcaatgtatcacagtgctgagacaaagcaacaatagcaagtatggggatggtttttagcaagtgctatttcagcctttgtagtaggagttacagagccaattgaatttgcatttatgtttgttgcacctgtactttttatcatacatgccttattaacagggctttcattatttattgcatctctatttcagtggactgcgggattctcatttagtgcaggattaattgattatgttttatcactcattaatccagtcgctaatcaccctttaatgctattagttcaaggtattgtattctttattttatattatgttatttttagaattatgattaaagtattgaatttaaatacaatagaacgtggtgataacttactagctgatccaatagtagaagaaacgacaactatagataaatcaaaaagtggaaaatatcatcaaccagctacacaaatattagaaggtttaggtggaaaatctaatatcgatagtttaacaaactgtgctacacgacttcgtttagaactaaaagataatacgattattgatgaacaaaaaattagaaatgctggagctgttggggtgacgaaaaatggccaccattcaacacaagtaattattggtacacatgttcaacaagtagcagatgaaattgaaaaacagatgaaataattcaacagaaacaataaaagcgacattatatgtccaaatcatttgttacactatagtcctattgataaatattatttatataaaagagctaatgctagattttaagcattggctcttatttttattacattgactttatataaatgttcgttatgattataagtatcagaatagtcaaaaaatggagagatgtcgatgaaatcaattttatttgatgtagatggtgtgtttttaagtgaagaacgttgctttgatgtatctgccttaacagttgaagaactattaaagagtgatgattttttaggtttagatagcgctcaaaattttaatcatatgaatgatgaattaattgaagatataagaacacaagtatttttaaacgatcaaattttaaatcaattaaaatctttaggccttaattctaactgggatatgttatttgttgtatttagtattcatttcatccatctcttgaaacagttggattcagaaacaattagacaagtgactcatgttgaaacgttttcagttgagactctacgtgaattacaatcttataattatcaatttaaagttaattatgcagtaccgttaaaatttattcaaaatagtcaaagtggtaaagagaatatttatcttgaattagaagattacgcaaaagatcaattaaatattgaaaatgctaaattatttaatttaaaaagtccactttggaatttagctagagcagtatatcaagaatggtatttaggaacaactttatatgaaaaagtagaaaagcttactcctttgtctattcctaagtctggttttatttatgaagaaaagatcttacgtcctgtggaagaaattaaaacattattaaatgatataaaacaagcaggttttaacattgccattgcaactggtagaccaagaacagaaacaattgttccatttgagtcctttggtcttaaatctttttttaatgaaaatcatattgtcacagcgagtgaagtattgaaagctgagtcagtatttccaaaagaagggccactaggtaaacctaatccatttagttatattgcaactctttatggaaacaatgagggagattatttgcactatattcaaaatcaaaaacatattgttaatgagaatgatgtatttattgttggtgattcattagcggatttattatgtgctaaaaagattggggcaacatttataggtactttaactggtttaagtgggaaagaagcaaaagaagacctagagcaacacggtgctgactatattgttaatcatatttgtgacattagacatattctacttaataaataataaaaagaaaggaacgccgaatattatcgtcgttcctttcttatttattatattgataaagttgtaccgtagatgttatcaaaatcaccaatctcatataattctttaataacttgttgagtaataggttgatctattgacagaatcatcattgcttgtccaccttcagaacttcttcctaaagacattgaagcaatattgatatcatgtttaccgagtagttgacctgttaaacctaccattcctggtaagtctttatgataagaaataaattgataagtattgggtttaaaatctactgaataatcattaattcttacaatacgtgcaccaaatccatctattacagttgcaccaatttttacttcttcatgttcacttatcaaattaatttgaatataattgctgaatgttccttgtgaagcacgattttcaatatgatgagtgataccttgttcgtttaataatgcaatagcattaattaagttcacgcgttcacctaaattttgttttaaaattgacgtgacgattgatcgagtaattaaatcagattcttttttagcattttctccgttaaaagtcactttaatctctctaggtgcatcatctaataattgaattgccaattcacctgaaagctggctaatacgaagccattgttgtgtcttctcatcaatatggtttaagtttaacttaggtgcattgactgcatttgtaacattaccattttctaaaatatcaatgatttcttcagcaacggatacagctactttttcttgtgcttcaatcgtagatgcacctaaatgaggagttacaataatatttttatgatcgagaagcggtgaatctaggggaggttcattttcaaatacgtctaatgctgctctagcaatttgatgttgatttaaagcattaagcaagtcgttttcattaataattccgcctctagctacattaataatttgtaacgttggtttggcttgattaaaaaaatgagcatcgataattccttttgttttaggtgttaacggtgtgtgaacggtaacaaaatctgaacgttgagcaatttcatcaatcgttgctagttcaattccaagttgctcggctttttctttagtcaaaaaaggatcataagctaaaacagtcataccaaaactttttaatctttctgctacacctaaaccaatacgtcctgctccaatgacgcctaatactttttgatataattcaactcctttaaatgctttacgattccattctttattctttagtgatgtgtaagcttgcggaatatttcgtgccattgctagaatcatagcaactgagtgctcagtagcagaaatcgtatttccatcgggagcatttacaacgagtataccgtttagagttgctgattttatatcaatattatccacacctacaccggctctagcgataacttttaagtttgaagcatggttaataatagattctgtgacttgagtttgactacgtacgattaacccttgatagttaggaataatatcgacaagttcttcttcagttaaaccagacttaaaatcaaccttaaaatcaggatgatggattaaactttgtaaaccttcttctgaaattggatctgaaactaaaatattatgcgtcatgttgaattacctccgtaaattttaacgtagctttaccaatataattgactttacgataatctgtaagaattatctctaaagctgaaacaacagataaaatatcaaaaggtgacacttttcccatgtgaccaattctcaaaatggttccttttagtttgccttgaccaccagcaatagtaatattaaatcttgattttagtgttgatttaatatatgttaattcgtctttatcgtgagggataaaagaagtaacagtaggagaggcatatgagtctttagtaactaataattttaaatctaatgcttttaaactttctcttaaaccacctctaatcaaataatgtctgtgaatggtattgttaaatccttcttttttaataagtgcagcataagcgttaaccgctctaaataatccaacatttggtgtgaatggagtagaattttgttcaatagaatcaaagtacttatttaaatttaaataaaaacgtggtgttttaactgctttaaatcgctcttgtgcacgatgattataagcaacaaaagatagaccaggcggtaacattaaagctttctggctacctgacacgagtacatcaatattgtctctttctaaatcgacatcaacggcaccaatacaacttacgccatcgacaacgaagtaaatgtcttgattgaatgctttaattacttttcctaattcgtgtatagggtgaagtacagcagtagaagtttcgcaaaattgagtgaatacagcagtaatatcataattaagtgaatgtaaatatgtttcaaatgcttcaatgtcgacagcttttccccattcaacatcataaacatgtacattcttataatatgtttccgcgatttgtttaaaacgattaccaaatgcacctgatacaatgactacaaaatggtcctcaggattgactatatttaacatactagcttctaaaacactagtaccgcttgaagtaaggatcattactttgtttttagttccaaacataggttttaaatgattaaatgcttcttctgcgacagcttcaaaatctgaagaacgatgacctatcattgataaattaagtgcatgtgtgatttcatcaggtacaggggttggtccaggtgttaataataaaggttcgtaataatacatcgtaaatcttcctcctgatataagattttttaattttaccaaatattctgaaattttaaaagtctaaaataaaaagcggcagtttaattgcccgcttttagttctcatcttgaatggttgcttgaatttctattttaacgttgtttcgaattgagttagatatcatacaatgatgatcagcaatatctaatagtttaggaagtcgtttattaagacgcgttttttcttcttctgtaagagatattgttggataatgagtgattttttccattttaaattttccattttcaaaaactgcactcccaattgacttaatttctaaatgaatattagtaaatttagctcgttcaagtgtagcagctaaagagataatataacatgaggaggctgctgcaactaacatttcatcgggatttgtcccagttccattacccccaagtgaagagggaatagaaatttgctcagaaattacatcgcctttaactttaccgatttcttcacgacccccatgccatgacgtatgaactacaaaatcgtgtttaaccattattattgacctcctatatcattatggtaatttaagtgtagttgaacatataactaatttaaaggatggtgtttaaaaatgaaaatacaaaagcctaatacatcatttcaaatcgttgcacatcgtggattatcgcagaaatatcctgaaaatacgttggaaggttttaaagcagcccttatgcaacatattgatatgttagaaattgatgtacattttacaaaagataaacaattagtagtcattcatgacgactccattgatcgcacatcgaatcaaaagggtaaagtaaaagattttactttagaagaattaaaacaatttgattttggaatcaaacatggtgaatcttttaaaaatacctgtatttctacttttagcgaagtactttctttatttaaaaaatattctaaaacattacttattgaaataaaaaaaccagaacagtatcctggcattgaaaaagcgttacttgaggaactagataaatttcaaattccctctcatagagtcgttattcagtcatttgatgtggaaagtgttaaaaaaatgtctgaatacacaaagaaatatgcactaggtgttttaataagtaaaaagcaatactggtacaaacaacctgattatgaaaatatagcttcttttgcacaatttataaatcctaattataaattaataaataaaaaatttatcaagcgtgctcatgaacatcatcttaaagtaataccttatacagtaaataacgtgaaagatgtgaagaaattgattcatttaggagtagatgggattatttcagatataccagatgatatatttaaactataaataaaaaaccaccctgaccaaaatggaaagggtggtaaaatattaatcaacttatcttgagtagtactcaacgattaattgttcattaatttcagctggtaattcactacgttctggtaagcgaacgaaagtaccttttaagctgtcagcatcgaaatctaaatattctggtacgaaattgttgatttcaacagattctttaatgatatctaagttttgtgatttttcacgaactgagataacttgaccaggttttaaagcgtatgatgggatgtcaacacgtttaccatcaacttcaatatgaccatgaccaactaattgacgagcttgacgacgtgtacgtgctaaacctaatgagtaaactactgcatctaaacggctagctaataaaatcatgaagttttcaccatgtacaccgtgctgtttaccagcaatatcaaatgtattacggaattgtctttcagtcattccatataaataacgtaatttttgtttttcacgtaattgtaaaccatattctgataattttttacgttggtttggaccatgttgtcctggtgcgtaaggacgtttttctaattctttaccagtaccacttaatgagatacctaaacgacgagattttttccagttagaacctctgaatcgagccataataagactcctcctttttcttttttgttggaatgaataaacaaaaaagagtgttgtatgctcattaagatatattgttttatgtgtcttcaccttatagctacagttacatgacacgtccacatcgggaacaacatagagcttaataatatacaactgctattttcgttaattcacacaaaatccattgtaccattattttttaaagtgtcaaggaatcatttgaatttattattttgataattggtgttctaagatagaaacgatttcttcaagtccttgttgatcgtctttactaaatcgttgtgtaataggcgcatctacatctaacacgccgatgatttcattattaacatgaattggaacgacaatttcagatttactattagcatcgcaagcgatgtgaccaggaaatgtatttacatcatctacaagttgtgtttggttatttgcaacagcagttccacatacaccttttcctatagagatatgtatacaagcaggatggccttggaaaggacctaaaataagttcattattttcaattaaataaaatcctaaccaattgatttgatctaaattgtcattgagtaaagctgaagtattacttaaaattgcgattagatttgtttcatcttcaataagacttgcaagttgtttacctaataagttgtaatttgtttctttaattgtcggcatataaaaacctctctatcaatattttgattattagtataaatgtaaaaaatttttcaatcaattctttgaattttattttaatgacgagataagatacgttataataatgataatataggaggagaatgagatggttttatacattatattagcaattattattattatattgattgctgtcggtattatgttttatttacgttctaacaaacgtaaaatagttgagcaagcagaagaacgtaaattaaaagttcaacagttaccttttgaagataatttagaaaagttatcagctttaaatcttaaaggtgaaacgagaacaaaatatgacgcgttaaaacaaaacacattagatcacactaataactatttagcaccagtagaagaaaaaattcatgacgctgagcttcaacttgataaattccaatttgcaggagctcaaactgaaattgatgatgctcatgaattaatggatagatatgaagctggttatcagtcacaagtagatgaagtaaatgaaattctttctctacataaagataacgaagcaatctatgaaaaatgtaaaacagattatcgtgaaatgaaaagagatgttttagcaaatagacatcaatttggagaagcggcagctcctcttgaaaaacgtattgaggcttttgaaccagaacttgatcagtatgacatgctgaaagaagaaggtaactatgtacaagctcataatcatattaatggattaaatgaatctattaatgaaacaaaagaatacatggatgaaattccagatttaattagagaaactcaaaaagagttacccggacaattccaagatttaaaatatggttgtagagatttaaaagtaaatggttatgacttggatcatgtaaaaattgatggtacattacaaagcttaaaaactgaattaaattttgtagaacctatgattagtcgtcttgaattacaggaagctaatgataaattgcaacaaattaatgataagcttgatgaaatgtatgatttaattgagcatgaagtaaaagctaaaaatgaagttgaagaaacaaaagaagatattacaaatgaattattcaaagcgagagaaatgaattatacgcttagaacagaaatcgactatattcgagaaaactatttcattaatgaaagtgatgttcatagtattagacaacatgaaaatgaaattcaaaatctagttgtagtatatgatgatattctaaaagaaatgtctaaatctgctgtgagatatagtgaagtaaaagataatttagaatacttagatgaacatgtaaaagtgattaatgaagaacaagaaaaattacaaaatcatctgattcaacttagagaagatgaagctgaggctgaagataatctattaaaaattcaatcgaaaaaagaagagatttatcgtcgacttcttgcttcaaacttaacaagtgttccagagcgatttgttattatgaaaaatgaaatcgaccatgaagtaagagcggtcagcgaacaatttaacgaacgtccgcttcatgttaaacaacttaaagataaagtttcaaaaatcgtaattcaaatgaatacttttgaagatgaagcgaatgatatattagtcaatgcagtctatgcagaacgattaattcaatatggaaatagatatcgtaaagatcatcatactgtagataaaagcttaaacgaagcagaacgtttatttaaaaataaccgttataaacgctcaattgaagtatcagagcaagcacttgaaagtgtagaacctggtataacaaaacatattgaaaatgaagtaattaaaggataataaatttttatagttagagaatgacctagacatccacatatttctaggttattctcttttattttaaaaaaaaaatagtataatgcttgagtgtctatttttaagtcgagaaagttaaaatatgttttagatatgttattgatgaaagtgagtgttctatatatatgatttatttagacaatgctgccacaacaaaaccgaaccaagcggttttagattcatttctaaaagtaagtgagaaagcttattataatgctaatagtcctcatcaaatgggtttacaatcagaaaaaatattattacaggctaagtcgcgtgtaaaagagatgttaaacctcaataaaaatactgatatcattttcacaagtggtgctactgagtctaataatattgcactcaaaggtattgcattaagaaaaaaacaatttgcgaatgtaatcattacctcagtcttagaacatccatcagtattagaagtgatgcgttatttagaaacacaaggatttatattgaaatatgtgaatgtgactccaaatggtcaaatagatattaatcatttagaacaattaatgacggataatgtgggcttagttacatgtatgtatgtcaataatgttatgggacaaatacaaccgataaaagaaataggatcattattaaaacaatatcctaaggcacattttcacgtagatggcgtacaggctttagggaaaattccaatgcaattagaggatgtaaatagtattagttttagtggtcataaatttaatggtttaaaaggtcaaggcatattaattatcgataataaggaaaaaattgaacccacaatatttggcggtggccaagaatatggaattagaagtggcactgtaaatttagcaatgaatgtttcacttgtgaaagcaatggaaattgcaattcaaaatttagatgagcttaatcatcgtctatcacgctataataaagtaattagagaatgtttaagtcaatataagggagtgtatattaattctccagaaaatagtgctccgcatattttaaatatcgcttttccaggagtaaaaggagaagtgcttgttaatgcattctcgaaattggatattatggtatcgactacaagtgcatgttcgtctaaaagagaaaaattaaatgaagttttgttagcaatgggtattaaggataacagaatagagggaagtgttcgcttatccatgggtgaaacgacaacagaaaaagatatcgaacaatttaaagataaacttgaattaatctatgctcaaataaaggagttgttgaaataaatgaaatatgatcatattttggttagatatggagaacttacgttaaaaggaacaaatagaagaagattcacaaatgtattaaaagaaaatgttattcaatcattacgttcattagaaggtacacaggttaaatgtgagagagatcgcatgtttatctcgctttttgaggacgtaaatgttaatgaagtcataaatcgtttaacaaagatatttggcataaaatctattagtccagtatttaaaacaacacaaaatcttgaagatatgaaacaactttgtatttcgttagctaaagactttgcaaatggagatacttttaaagttgatgtaaaacgtgtagataaatcattttcattagatacgtatcaactacaaagagaactaggtgacgccattttaaaagcagttgatcatttaaaagtagatgttaaacgtccgacacataatattaaagtagaagtacgtaaaaaaggcgtgtatatctatactaaagttatcaatggtgctggcggattacctaccggtacaggtggtaaaacacttcttcagttgtcaggtggaattgattcaccagtagctggtatggaaattatgaaacgtggagtaaaaatagaagctattcattttcacagtccaccatttacaagtgaaaaagcgaaagacaaagtgattgaattgacacgcatactatctgaacgtgtaggaccaattaaattacacattattcctttcacagcacttcaaaaacaaatcaataagtctgtgcatccacgatataccatgacttctactagacgcatgatgttacgagtgacagatattatcttagaacgtattggagcgaatgctatcgtaaatggtgaaaatttaggtcaagtagctagtcaaacattaaagagtatgtacgcaatcaatgatgttacatctactcctattttaagaccacttatttctttagataaagaagatattattaaaaaagcaaaagaaataggaacatttgaagtttcaatacaaccttatgaggattgctgtacgattttcacgcctgaaaaccctgtaactgaaccagattttgataaagttgttaaatatgaaagtgtgtttaattttgatgatcttgtccaagaagcagcagacaatgtagaaacaatagagattaataaagattataaaactgaaaaagataaacatactgatgcgctcattgatgaattattttaatatgaaagtagtaaagtcatttaataagaggtgggcgttattgaactaagttttcatattattttcattattattagttttggtttcttggcagcatttatagatgctgttgtgggtggcggtggcttaatatcaattcctgcactcttagctataggaatgccgccatcattagcattaggtacaaataaattagcgagtgcgtttggctcattaacgagtgcaatcaaatttttaaaatctggaaatgtggataaaaaaatagcatttagactatttccgtttgtatttatatttgcagttggtggagcaagtttagcaactttcttaccatcagaagttttgaaaccactcgttatagtcatattgacatttgttttaatttacaccatttttaagaaagagtggggtaatgtcagaacgttttctaaatttactattactaaagcgattgcctttatatcactcctgcttttaattggattttatgacggatttttaggcggtggtactggatcatttatgttatttgtattattaatgtttggatttgattttttaagtgcagctggaaatgcaaaagtactaaactttgcttcaaacgttggtgcattaacattatttattattcttggccaagtaaatataacatatggattaattatggcagtcagtatggtgattgggtcgtatactggtgcacattttgcaatcaaaaaaggtgtaggatatgtcaaaattgtatttataatagtcaccattttactcattttaaaaaatacctttgattatattatgcaaatcatttcaaattaaaataatagttagcgttttaaatgattgaaataagtttaaatactatcgtatcattaaactataatttaaataactaatgggaggtcatataatatgacagaaattacttttaaaaataaccctatacatttagaaggaactgagatttcaaaaggagatgtggctcctaattttaaagttttggataatagtttaaatgaagttactttagataattttaaagggcaaaagaaattgattagtgtcgttccttctattgatactggtgtatgtgatcaacaaactcgcaaatttaatgaagaggcttctcaagaaaatggtgtagtacttacaatttcagcggatttacctttcgctcaaaaaagatggtgtgcatcaaatggtctagaaaatgtaattacgttaagtgaccataaagatttatcatttggtgaacattatggtgttgttatgaaagaaatgagattattagctcgttctgttttcgtattagatgaaaacaatcatgtagtttataaagagttagttcaagaaggtactgattttccaaatttcgaggctgctttagaagcatatcgtaatatttaagtcactactaaacgattaaattaaagatataatactaatattgtccatatgtattttaaaatgaatgatttcgttttaagacatttgcattatggacatttttttattggaaaggaattgaatatggcagaagaacaaactattatggaaagattattccgaactttagatgataaagctaagtcgttaaatgaagaaaatggtcaaagctttatagaaaatttaggcttagcaatggaagatgtatatcgtaatcaacgtacactgttagaacaagcaacgttccaagatcgtcgaaaagcatttcaatttgcttacttgagcttattacaagaagaaaatattcaagcaaatcatcaaattacaccagattctattggtttgattttaggttttttagtacaaaaatttacagaaaataataaagaattacagattgttgatattgcaagtggagcaggtcatttaagcgctacagtgaatgaagtattaaaagatagcgaagttatgcatcacttaattgaagtagatcctgttttatcgagagttagtgtgcatctagcgaattttttagaaataccattcgatgtgtatcctcaagatgcaattatgccattaccattggaagaagctgatgttgttattggagattttcctattggatattatcctttagatgggcgtagtaaagaaatgaaacttggatttgaagaaggtcatagttattcacactttttacttatcgaacaagctgtctatgctttaaaacaaagtggctatgcttttttagtagtacctagtaatatttttgaagatgaacatgtgaaacagctacaaaattttattactacagaaactgaaatgcaagcatttttaaaccttcctaaaacattgtttaaaaatgaaaatgcatgtaaatcaattttaatactacaaaagaaaaaagcaaatgaaactaagcctgtagaagtgttattagctaatattccagattttaaaaatcctaatcaattccatggttttattaacgaattaaatgaatggatggacgcaaatcattcacaaaaataaactgtgatattcttgaattacttctgtattagtggttaaatagatatggatatttaatatataaattggaggacaatgaatcatgtctaaattagttttagcgattaatgcgggaagttcttctttaaagttccaacttatcagaatgcctgaagaagaattagttacaaagggcttaattgagcgtattggtattaaagattcaatatttactattgaagtaaatggtgaaaaaataaaaagagttaaagatattaaagatcatgaagaagcaattaatatcatgttagatagcttcaaaaaacatggtattattaatgatattaatgatattgctggtacagggcatcgcgttgttcatggtggagaattattccctaaatctgctttagtcactgatgaagtagaagaaaaaattgagtcattaagtgaattagcgccattacataatcctgcaaacttaatgggagttcgtgcctttagaaagttattacctaatattccacatgttgtagtttttgatacttcattccatcaaactatgccagaaagttcttatttgtatagtttaccatataactattacgaagattttggtattcgtaaatatggtttccatggtacaagccataaatatgtatcacgacgtgcggctgatattttagaaaaacctattgaagaattacgtattatttcttgtcatattggtaatggtgcgtcaattgctgcaattgatggtgggaaatctatcgatacatcaatgggcttcactccattagcaggtgtaacaatgggtacacgctcaggagatattgatccagctttaattccatttattatggaaaaaacaggtaaaactgctgatgaagttttaacagttttaaacaaagaatctggattattaggtatctctggtacttcaagtgatttacgtgatttattaggtgaagctgcaaatggcgatgaacgagctgaacttgctttagatatttttgcttctagaattcacaaatatattggttcttatgctgctagaatgcatggcgttgatgttattgtcttcacagcaggtgtcggtgaaaattcatcaccaatacgtgctaaaattttagaaggcttagagtttatgggtgtttattgggatcctaagaaaaatgaatctactcacggtgaagaagctttcataaattatccacactctccagttaaagtaattgttgttccaactaatgaagaagtcatgattgcaagagacacagtaaaattcggtgaattataagatatattaaaaaaacgatgagattaaacttatctcatcgtttttttagaacatagcagggaaataggacaaaagtcatgttgaatttgttgtcctaccctgatgatgtatctctaacatattaaagagacctgagacaattccttatgtctcaggcctttttatttaaatacattactttattaagaaaattgttttctaaattcaggagttgcaacttcaggttggaaatcatctggaatttcttcagtacgcacgacaagtacgtcacacggtgcatgacgaacgattgcttctgaaacagaaccaacgataaatcgttctactgcatttaatcctgaagtaccacacattattaagtcgacacctaattcatttgctaattttttaggtataattgctttaggtgagccaaattctagacgagtttctacatttgtaacaccagcacgtgaagcaacttctttatagccttttaaaagttcatcagaaaaacctttagatttttctgtgaattgagcatcgtacacttcataagaagagtaagttcttgaatcgataatattaacaatagttaattgagcatcattacgtttagcaacgtctaaagctttgttgaaagcccattctgcttcatgtgaaccatcaactgcgattaaaatatttttataagttaacatcttaagtcccccttaacttttcttaattcaattttaacataaatttctgaatatttaatatttataattcaacaattatgtggacgttgtgcacctttgatgattgcgctttcattaatttagcgttactataaggagtggaggtgaatggaatgaaaatcggtattccaaaagaaataaaaaataatgagaacagagtaggtttatcaccaagtggtatacatgcattagttgaacaaggacatacagtacttgtagaaacaaacgcaggttctggttcatattttgaagacgaagattataaacaagctggtgcagaaatagttaacgatgcaaaaacaacttgggatgtagacatggtgattaaagtaaaagaaccattagaggaagaatataaatatttcagagaaggtcttatcttattcacatacttgcatcttgctaatgaggaaaaacttactcaagcattagttgataataaagtagtaagtattgcctacgaaacagttcaattaccagatcgttctttacctttattaacaccaatgagtgaagttgcaggacgtatgtcagctcaaattggtgcagaattcttacaaaaagttaacggtggaatgggtattctacttggtggcgtgccaggtgtaccaaaaggcaaagttaccattattggtggcggacaagcaggtacaaatgctgctaaaattgctttaggattaggtgcagatgtaactattttagatgtaaatcctaaacgtttagcggaattagaagatttgtttgacggtcgtgttaatacaataatgtctaacccacttaatattgaaaatgcagttaaagaaagtgacttagttattggtgcagtattaattcctggagcgaaagcaccaagtttagttactgaagatatgattaaacaaatgaaagacggttcagtagtagtcgacattgctattgaccaaggtggtatctttgaaactactgataaaatcacgacacatgatgatccaacttatgttaaacatggtgttgtacattatgcagtagcgaatatgcctggtgcagttccacgtacttctactattgctcttaataatgctactttaccttatgcacagttacttgctaataaaggttataaagaggcatttaaagcaaatgagcctctttcattaggtttaaatacgtataaaggttatgtaactaataaaggtgttgcagactcctttgatttaacttatacatctattgaagatgcattaaaagaataatctaaattaattcaataaaaagcggaataacattctttatgagtgtctattccgcttttttgatataaaagagagatttaacttttaaattacttattataatgtgtaagtacttcaaacccagtatcagtgactaaaatatcatcttcaattcggacgccagcgacattaggcacataaatgccaggttcaattgtaatcaccatacctgcttcaagtaaatttgtatttgtacttgatacatcttgatattcatgttcttctaagccgagtccatgtcccaatcgatgagggaagaaatcaccgtaacccgcttctgaaataatgtctctagcaattttatcaatattttgtaaagggatacctggtttaattgcttcaatagcactttgttcagcttttaatacaatatcataaattgttcttgcttctttacttggttcaccaaattttacagttcttgtcatgtcactacaataatgattatagactacacctaaatcaaatagtacatattcattcttaactaatgttcgatctccaggtgtaccatgtggagatgcagcatggtcaccaaatagtaccattgtatcgaaactcatttcactgacaccatattttttaatttcattttcaatatgatttacaacttctctttcagttacgccttcagataaaaatgaaacaccaatatctatacatttatctgcaagttcagctgctttttttatatttttaacttcattttcatctttaatatttcttagctttttaatagttaaatcgatatcttcatacgctttaacgttaaagttattcgtaagttctctttgacgtttaacagtgaggtgttcactttcaattaataaggtattaaatgtatggggtgctaaatcgaaaggactctcagtatctaaatagccaacaatatttccattaaaaggtgaatgcttaacttcttcaacttccattttaggacaatataatgtgcattcaccatttgaagttataagtaacgcaaacaatctttcatgaggttcacttctataacctgtaaagtagaatatattaagtggagtagtaatccatgctgcatcagcatttttttcttttaatgttgcaataatttcatctgttttaatcataatacgtatcctcctatagtttaatcaatttaattttacgtctaaatagaaatgaattcaaagtgtttcaagttataaatataattatcagggtataataatattaaaatataggaggttctatatatgaaactttcatttcatggacagtcaacgatttattttgaaagtaatggtaaaaaagtaattgttgatccatttatttctggtaatgataaaagtgatttagatgagcagacattagatgtggattatattattttaacgcatggacatggtgatcattttggtgatgtagttgaattagctaatcgtaatcatgctacagtgattggttctgcagaagtccaaggctatttaacaacgtatcatggaattgaacacgcacatggtatgaatattggaggtaaatacaaatttgatttcggtacagtaaaatttgttcaagccttccacagttcaagttatactaatgaagatggaatacctatttatttgggtatgccaatgggtgttatcattgaagcagaaggtaaaacgatttaccatgcaggagatactggtttatttagcgatatgaaattaattgctgaacgtcatccggtagatgtatgttttattcctattggtgataattttactatgggtattgaagatgcaagttatgcaataaatgaattcattaaacctaaaatttcagtgcctattcattacaatacattcccattaattgaacaagatccagagaaatttaaagaagcagtatctcaaggagaagtacaaattttacaacctggtgatgaagtgacattttaatgatatatagaaaagacggcaaatatagcatttaccgtctttttttataagattaaaattatttaactattaaaacagggatagtagcacgtttagcaactttatgactaacactacctaaaacaaatttcttttgttgttcagctttacggttacttaatacgacaatgtcatatttaccactatttgcatgtttcactaattcctcttttggatttccacgaacgataatttgatcataattaataccataatcatctaaagtatgacgtgtgtgttcaagaccttgatcacgacgatgtgtcaattgttcgatgtgagtacctcctttaatagaggcttggatgtcttgttcaccaatcgcattcatgattgtaacaacggtatctgggccagctaattttgaaatttctttcaatgctttgtcattttttaattgagtatctacacctagtaatatgtttttatacataggtcatccctccttatatttaattatataattagtgatttaatatttccatcaaatttatatttttattatttaaattaacttcatttatatacattaaaaacaaaatgataccgatatatcagtttttgatacttttgtcacattcaaatcgatttttataaataaaaaagttataatatattagacattgtctaaaaatgaagagggttgaaaatgactaaacatgaacaaattgtatcctatatagaatcattaaatataggacaaaaaatttcagttagaaaaatagccaaagtaatgaatgtttctgaagggactgcttatagagcaattaaagatgctagtcaacttggctttgtaactaccatcgatagagtaggtacggttcggatagataaaaagagtcgtgaacaaattgaacatcttacttttcaagaaattgtgaatattattgaaggtgacatcataagtggcaaaagtggtttaaataaaactgttagtaaatttgcaataggagctatggaactaaaagatgtagtaaagtatattggaaatcaaacgttattaattgtaggtaaccgtcctgaagttcagatggaagcattaaaaagaggaagcggtatacttattaccggtggatttagtacagctcaaaatattattgattatgcaaataaacaagaactacctattatttcttcaaattatgatacatttttagtagctaatatcattaatagagccatgtataatcaaatgataagaaaagaaatacttattgttgaagatatcgtaaaacctatcaatgatatgacggtagtgttcgatgaaatgggtttagacgactatatttctcgtgcaaaagtcacaggacattctcgttttccagtagtaaataaagattggaaacttgtgggaattgtaacgagtaaagaagttattcacatgaacgaagatgataggatgaataaagtcatgacaagacgacctatcaatgttgaattaacaactacagtagcgagttgtgctcatataatgatttgggaaggaattgaaattttacctgtcacaacaagaaataaaaaagcaataggtgttattacacgaaatgatgtgttaaaagcaatgcaattaattggaagacaatctcaaattggagaaaccattatcgatcaaattgccaaacacatctcaataaatcataatgagacgtctgttaaaatttcaccagttttaaccaaccaatatggtacgttgagtaaagcaatatgtgtcgcaattattgaagaaacaattaaacatgaattgcgtaagtataaaaaagtagatgttatgattgaaagcttgaatattatttatattaaaaatgtcgcaattgaaagtacgcttgatgtaaagtataacatgttagatgtaggaagaaattttgctaaattagaggtcactatgacttgcaaaaatgagaaagttgcaaatgcaatgattatatgtcaaatgtttgaagatatttaaaatagtttttgaaattaaaggagaaaagaaatggtagaaatttttaataaaataatgaatgaaattgataaatatgaaactgttattattcatagacacgttcgacctgatccagatgcatatggttcacagttaggcttaaaatattatttgcaacgtaaatttccagaaaagtctatttatgcagttggacaaccagaatcttctttagcatttataggggacttagacagagttagagatgatatatatcaaaacgctctagtgattgtttgtgacacagcaaatgcacctcgtattgatgatcagagatttaatcaaggcaaagatttaattaaaattgatcaccatcctgctactgatcaatatggcagaataaattatgtcgataccaatgcaagttcaaccagtgaaattatttttgattttattacacattttaatgatattaatattatcgatgaatctgtcgcacgtgttctatatttaggaattgtcggagacacaggtcgttttttatttagtaataccacaccacatactatgaatgttgctagtcgtttgctagaatttccatttaatcataatgatgtattaaatcaattgggtgagaaagatccaaaacttatgccatttcaaggatatattttgcaaaatttccaattaagtgaaaatcatcaatattgtcaaataaagattactaaagatgtcctaaacagatttcaaattgcacctaacgaagcatctcagtttgttaacactgtagcggatatcaaaggtctaaaaatatggatgtttggtgttgatgaaggtgatcaaattagatgtcgattacgttctaaaggaattactatcaatgatatagctaatcaatttggcggtggaggacatccaaatgcatctggagtctctgttgaaaattgggaacaatttgagattttaggtgaagccttgcgccaaaaactataaattacgaaaggaagtcatacatgtttgtacatttgaatattcattcaacatatgatttattatattcaagtttaaaaattaacgatgtcgtatcaaaggcaaaagcaaatggatatcaagcacttgcaattacggatacgaacgtattatatggcttccctaagttttatgacgcatgtgttaatgagggaattaagccaatatttggaatgactgtaatggtttctgatgaaattagcacaattgaaaccatattattcgcaaagaataatgaaggtctccatgctctgtatcaactttcttctgcaattaatatgaaacaaaagactacgatacccctaaaatggctacaaaaatatagttaccatcttgctattgtttttaaagatgctaatgcgtctcatcaatcgttaattcaaacactaaagaataatgagtcagtatttataaatcatacaagtcaattagatttttcagacgataaaattgtctttcttaataatgcaagatatttaaatcctgaagatgcagatacaatacttgcattaaaagcaataaaaaacaatacaaaattggatttagtaaatgatatcaaggatgctcatgaatattttccaactagtgaaaatattaaagaacttcagttgtctgaaaaaataatagctaatacaaaggctttagctgatgagtgtaacgcagaaattcaataccatcaaaatctattgcctaactttaaaacgcccaatcaacaaagtgctaaatcctatcttttagaaaagttaaaatataatcttaaagaatttaaattagataaagatcagcgatatattgaccgattacatcatgaatattcaataataacgaatatgggattcgaagattattttttgatagtgagcgacttaatacattttgctaaaacgcatgatgtgatggttggacctggacgtggttcatctgcaggatctttagttagttacttattaggtatcacgactattgatccaattaaatttgatttattattcgagcgctttttaaatccagaacgtgtcactatgccagatattgatattgattttgaggatacgagaagagaaaaagtgattcagtacgtacaagaaaagtatggtcaatatcacgtatcgggcatcgtcacttttggtcacttattagcaagggctgtagcgagagatgtaggccgtattattggttttgacgaaaaaacgttaaatgaaatatcgaatttaatcccacatcaattaggtattacactagaagaagcctatcaaaatgaaaaatttaaagcatttgttcataaaagttatcgtcatgaaaaatggtttgaaattagtaaaaaactagagggcttaccacgtcatacatctacccatgctgcaggaataattattaatgataaaccattgtatcattttgctcctttaacaatgggggatacaggtatattgactcaatggacaatgactgaagcagaacgattaggtttattaaaaattgattttcttggtcttagaaatttatcaattattcatcaaattatcactcaagtaaaaaaagatttaaatattgatatcgatatagaacgactcccttttaatgatcaaaaagtatttaaattattgtctctaggaaacactacaggtatatttcaattagaatcagaaggtgttagaaaagtattgatggaattacagcctgaacactttgaagatattgttgctgtaacatcattgtatagacccggtccaatgcaagaaatacctacatacatatcaagaagacatcgtcaaagtgacattaaatacttacatcctgatttggagcctattttaaagaagacatatggcgtcattatttatcaagaacaaatcatgcaaattgctagtcaattcgctaattttagttatggtcaagcagatatattaagacgtgcaatgagtaaaaaaaatagagctatcctagaaagtgaacgtcaacactttattgaaggggctgtaagtaataattatgatgcatcaattagtgaacgtattttcgaactaatattaaaatttgcggattatggttttcctagagctcatgcggtgagttattctaaaattgcatatatcatggcttatttaaaagtgcattatcctaattatttctacgcgaatattcttagtaatgttataggtaatgaaacaaaaacggcaataataatagaagaagctaaaactcaaagtttaaatattttacctccagatattaataaaagtcattggttttacaaagcgacagaaaaaaatatttatttatcgttgggcgcaataaaaggtgtcggatatcaaagcgtcaaatctatagtagacgaacgaattgaaaatggattgtataaagacttttttgatttcaccagaagaattcctaaaagaattaaaactagaaaattgttagaagcattaatatgtgtgggcgcatttgattcatttggtaaaactagatcaacactattatctacaattgacgaagttatcgatcaagtttcgaatgttgaacaagatgaatttttatttaatatgttaacaccaaagcaatcctatgaagataaagaagaattcagtgatcaaatcattagtgcttatgaaaaagaatacttaggattttatatttctaaccatccagttgaaaaactattttatatcaaacaatatttaggtatttttacgattaagaatagtttagattatcaacctatacttgttcaggttaatcaatttaagcaaataagaacaaaaactggacaacatatggcgttcttagttctagatgatggtagaaccactattgatggtgttttgtttccagataagtacaaacaatatgagacaatgattcaacaacaaaatgatattctagtcgttcatggcaaatttgaagaacgaaatcaaaagagacaaattatcattcaaaatatggatacaattaacgactttgaaaataacaaattatctcaagccaaacaaatagtgattagaaacgtcaatcaattagaagatattaaatcatttttaatagatcagactacacataacgatttagaagtagttttatttaatgaaatgcaacaacaaactcaatctttaggatttttacaaaaagaaatggaacaagtcgaaaggtttataaagatgttcaagccaagtgacatcagaattatataacttttatatgcaaaaaaattatgatatagttagttgatggttataaagaagaattaataattttattgattttttatctcttgatttaataacatgtagcatataaaaagatttttaaaattgaacttaattgttacaaaaatccctcttttcaaaagtaatttaattataaatcaattagaagttgattgaatgtctttaagagacgatgcattacaaatgcataaagagaatcaaggtaaattagaaatcaaacctgatgatgcgaaagaagtagtgctaaagtagtaggaacgagacgaccttatttttcaaatcaagttaataagatattagcttttctaggtatttttaaagatatcttagatattgaaactactcctttcgattaaagagtggcaccatcagtgacacgagatttaacacgatctgttatagaattaggtgttgcatgtattgaagtagatttccaataagtatatgataaaacaatgaagttaatagatttaaaataaagtaagcgaatttaaaagtaactatttaaaataacgaaattattgagtgagttatgcggaggtttacgcatgtttaaagatttttttaatagaagtagtaaaaaaaagaaatatttaacggtaccggattctaaacaaaatgacgtaccagcaggcatcatgactaaatgtcctaattgtaaaaaaataatgtatacaaaagaactaactgaaaatttaaatgtatgctttaattgtgatcatcatattgcacttcctgcgtacaaaagaatagaagctatttcagatgaaaattcgttcaaagaattcgataaagaaatggtttcttctaatcctttggattttcctggctatcaagaaaaagtcgaaaaagatcaaaagaaaacgggtttaaatgaagccatcgtaactggtacagcagaattagatggcgtgaaatatggtattgcagtcatggactcacgatttagaatgggaagtatgggctcagtcgtaggggaaaaaatctgtagaatcgttgattattgtactgaacatcggttaccatttgtattattttctgcaagtggtggtgccagaatgcaagaaggtattatttcattaatgcaaatgggaaaaacaagtgtatcattaaaacgacattctgatgctggattattatatgtttcatatttaacacatcctactactggtggtgtatcagctagttttgcttctgtgggtgatattaacctaagcgaacctaaagctttaatcggttttgctggacgtagagtgatagaacaaacaattaacgaaaaattgccggaagattttcaaactgctgagtttttattagaacatggtcaattagataaagttgtgcatagaaaagacatgaaagcaacactttctgaaattttaaaactacatcaagaggtgaagacgaatgcttgatttcgagaaatctttatatgagattaaagaaaagattaattcattgaaggaatctcaagaaaaaaatgacgtcgacttacaagatgaaattgacttgttagaagcctctttggaaagagaaagaaaaaaaatatataccaatttaaaaccttgggatcgagtacaaattgcaagacttcaagaaagacctacaacacttgattatattccatatatcttcgactcattcattgaattacatggagatcgtaattttagagatgatcctgcgatgattggtggaataggatatctcaacaatcaaccggtaactatcataggtcagcaacgagggaaagatactaaagataatatttatcgtaattttggaatggctcatcctgaaggttaccgtaaagctttacgcttaatgaaacaagctgaaaaatttaagcgtcctatttttacgtttattgatacgaaaggtgcatatccgggaaaagccgctgaagaacgagggcaaagtgaatcaattgcgaaaaatttaattgagatggcttcgcttaaagtacctgtgattggtgttgtcatcggtgaaggtggaagtggtggtgcgcttggtattggtataactaataaattattaatgcttgaaaatagtacttattctgttatttctccagaaggggcggcagcattactttggaaagatagctctttagcaaaaatggctgctgaaacgatgaaaattactgcaaaagatttactggaattaaacgtgatagatgaagttattactgaaccacaaggtggcgctcataaagacatcgtttttcaagcaaaacaaattaaacaatcttttattcatcagcttaatgaattaaataaattagatggacaagctttagcgaatcatcgatttaataagtttagaaatattggtacttttattaattaacacagaatgactagaaattttaattaaatttctagtcatttttttatataaattaaattaaaaatttaaaacgtttacatatatataatctattaatattaatggaatagataataaaattatggtaatttatacatgaagattattatagttaggaaagggtatgtcgctatgaagagaattgcggtattaacaagtggtggagattcaccaggcatgaatgctgctgttagagcagtcgtacgaaaagcaatttataataatatcgaagtttttggtgtttatcagggttatcaaggtttacttgatgataatatccacaaacttgaattaggaagtgttggagatacgattcaacgaggaggaacttttctatattctgctagatgtcctcagtttaaagatgagagtgtaagacaaaaagggattgagaacttacacaagcatggtattgaaggacttgtagtagtcggtggagatggcagttatagaggtgctcaacgtattagcgaagaaacaaccgatataaaaacaattggtatccctggaacaattgataatgatattaatggtactgatttcacgattggtttcgatacagcattaaatacgattattgactgtgtcgataaaatcagagatactgcttcaagtcatgcgagaacttttgttgtagaagtaatgggacgtgattgtggtgatttagcactgtgggctggattgtcagtaggtgctgaaacaatcttagttccagaagtgcacacagatattaaagatgttgctgaaaaaattgaaagtggtattaaacgtggaaaaaaacattctatcgttatggtagcagaaggttgtatgagtggccatgaatgtgcagaacaattaactaaatatatcaatgttgatgcacgtgtatctgttcttggtcacatccaacgtggtggtagtccatctggtgtagatcgagtgcttgcttcaagattaggcggttatgctgttgaattgttaatgcaaggtcaaacaggattcggtgtaggtatacaaaataaccaacttacagcaacaccatttgatgaaattttcaataatgaaagccataaattcaacactcgtatttatgacttagcaaaagaattatctatttaatttaggaggcttttataatgagaaagactaaaattgtatgtactataggacctgcttcagagtctgaggaaatgttagaaaaattaatgaatgctggaatgaacgttgcgcgtttaaatttctctcatggtagtcatgaagaacataaagcacgtattgattcaattcgtaaagtatctaaaaaattaggtaaaactattggtattttattagatactaaaggacctgaaattcgtacacatgatatgaaagacggcttaattgtacttgaaaaaggtaaagaagttattgtgagtatgtctcaagttgaaggtacacctgagaaattctcagtcacatatgaagatttaattaatgatgttcaaattggatcatacattttattagatgatggtttagtagaattacaagttaaagatattgataaagataaaggcgaagttaaatgtgatatcttaaacactggtgaattaaaaaataaaaaaggtgtaaacttacctggtgttaaagtaaacttacctggtatcactgataaagatgctgcagatattaaatttggtattaaagaagatattgattacattgcagcaagctttgtacgtcgtcctagtgatgtattagatattcgcgaaattttagaacaagaaaataatgataatattactatcttccctaaaattgaaaaccaagaaggtattgataatatcgaagaaattttagaagtatctgatggtttaatggttgctcgtggtgacatgggtgttgaaattccacctgaatctgtgccaatcgttcaaaaagatttaattagaaaatgtaataaattaggaaaacctgttattactgcaactcaaatgcttgattcaatgcaacgtaatccacgtgcaacaagagctgaagcaagtgacgttgctaatgcaatctatgatggtacagatgcagttatgttatctggtgaaacagctgcaggacaatatcctgaagaagcagttaaaacaatgagaaatattgcaatttcagctgaagctgctcaagattacaaaaaattattatctgatcgtactaaattagtagaaacatcattagtaaatgcgattggtgtgtctgtagcacatactgctctaaatttaaatgttaaagcaattgtagctgcaactgaaagtggttcaacagcgattacaatttctaaatatcgtccacattcagatattattgcagtaacacctagtgaacatactgcaagacaattagcactagtatggggtgcatatccagttgttaaaaaaggacgtaaaacaacagatgatttattaaataatgcagtagcaacagctgttgctactgaaaaagttggtaatggtgatttaattatcattactgctggcgttccaactggtgaaaaaggtacgactaatatgatgaaattacatttagtaggtgatgaaattgctaaaggtcaaggtgttggtcgtggatcaacaactggtaaaacagtgatttctaaaactgctagtgatttagaaggaaaagacctaagtcaatcaattattgtgactaattcaatagacgaaagctatgttccatatgttgaaaaagctgcaggtttaattactgaagaaaacggtataacatcaccaagtgcaatcgttgggcttgaacaaggtatcccaactattattggtgttgaaaatgcaacgaaagaattgaaaaatgacttattagttactgttgatgcaaatcaaggtagaatttttgaagggtatgcaaatgtcctttaattaaacaattgtataagtatgtttaaatagaaagctagaagagcgggaataaccacgttacatgttaatggataaaattctcgctcttttttatgttatttaaacatattagaaaaaagtgggagagagccgtattcgtcgtcccaacttgcattgaacgtagattttcattaagaaaatctctatgttggggatagtagtgttgaaaaagcttgttacaagagtatttcaattcagacatcgactgcattaacataaaaatgactgggacattattaatggttccagtcatttttcatattgatattttaatgttattttgctacttttttatatcttaaatacataatacctaaaataataaaccaaataggtgttaagaaaatagcgtttcttgttgttgcatttacaaatagtaaacaaaacacaaataagaagaatgctaaaataatataggccatatattttccaccaggaagtttgaattttgcttttttatgtaattcaggattttttctatgataattaatataagcccaaataattaaagcccacacgataataaataatactgttgaaattgttgtaacatatgtaaatactagcgttgcatttggaaaaatatagtttaataatgctgtcaccaataataacgcagatgatacaataattgcgatatgtggtacaccttgcttgttagtacttttaaatatagaaggcgcttgtttttgttcagataatccaaataacatacgactatttgagaagataccactattacaagatgaagcagcagcagttaaaactacaaagttaattaatccagctgcaaatggaataccaattaatgagaacaatctaacaaatgggctctcatttggatccactttgtcccaaggaataatagacataatgactgctaaagcacctacatagaaaattaaaattctaatcggtactgcatctatagctttaggtattgttttttctggatttttagtttcaccagcagttaccccaatcatttcaataccaacaaatgagaataaagccatttggaatgacataaagaaaccagaagttccattggtaaaaataccatgtttataaagattagttaaacttgcatgtccaaattgagttttataagcaaataaaatcattattgcaccaatgacgattaaagctataatagttataattttaataatagcaaaccagaattctaattctccaaataattttgcacttaataagttaaaaaccattaatattaatacgcaaaataaagcagtaatccagtttggtatagttggaaaccagaaactaacatatttggcaactgcagttacttctgccattcccgttataatccagcataaccaatatgtccatccagtaacgaatcctgcaaatggtccaatatactcgtttgttacatcagcaaatgatttaaaacgagtattttgaataatgatttctccaaggcctctcataaacataaatagcatgaatccaataatgatataggttaatagaatagaaggtccagtcatagctatagtttgacctgcacctaagaataatccagttccgatagcgccaccaagagcaatcaattgtacatgacgattacttaatcctctttgtaatttttcttctgccataagacaactcccttacatttaattaatattaattatgcacttatatattaaattcgacaattatttttctaaattttttctaaaaattttattaacattgagttaataaaagataatcattattgataaataattaaaatattcattattttcacataagtcaaccttgtcttaattcttataaatagctttataacaatttttataatcattataattaaaattaatatataaataatttaccaatgaaaatttaaaccacatatatcatgattcacaaaacttataattttagatatactatttatgaaagccattacattatgtaaaagaaaaggggaattacttatggcagaattacaaaaaggtttagaaggggttatcgcagcagaaactaaaatcagttcaattattgatagtcaattaacttattcaggatatgatattgatgatttagctgaaaatgctcaatttgaagaaatcatgttcttattatggaattatagattaccaacacaagaagaacttgaagaattaaaagagaaactaaaacaatatatgacattaaatccaagggtatataagcattttgaagaatatgctacagatgatgtacatccaatgactgcattacgtacctctgtttcttatattgcacactttaatccagatgctgaagaggaaacagatgaaagtcgaaaagatcgagctattcgtatccaagcaaagattgcatcattagttacagcgttttcacgcgtacgagaaggaaaggaacctgttaagcctaactctgatttaagctatgcagcaaacttcttgtatatgttaaaaggggaattgccatctgatactgaagttgaagcttttaataaagctttaatattacatgccgatcatgaactcaatgcttcagcatttacagcaagatgtgcagtatcatctctatctgatatgtattcaggtattgtagcagcaattggttcattaaaagggcctttacatggtggagcaaatgaacaagtaatgaaaatgttatcagaagttaaatcacttgatgaagtagataattatttagataagaaacttgctaacaaagaaaaaatcatgggattcggtcatcgagtatataaagagggagatccacgtgctaagtacttaaaagaaatgagtcgaaaaataacttctgaaaccggacataacgaattatatgaaatttctcttgcaatcgaaaagcgtatgcacgatgaaaaaggcttaattccaaatgtagacttctttagtgcaactgtttatcatagtatggaaattccacacgatatttttacacttatctttgctgtgagtcgtactgcaggatggaccgcgcatattttagaacaatatcgtgataatcgaattattcgtccgcgtgcaaaatatgttggagaaacaaatcgtaaatatgtaccagttgaagaaagataaaatattttaaaatttaatttatggaggcttttataatggcagctgaaaaaattactagagcaaatgatgaattattaaatgtacctaatgaaccaattattccatttattattggggatggtatcggtcctgatatttggaaagcagctagtcgtgttgttgatgcggcggttgaaaaagcatataacggtgaaaagcgtattgagtggaaagaggtattagctggtcaaaaagcgtacgatgaaactggtgaatggttaccacaagaaactttagatactatcaaagaatacttaatcgcaattaaaggaccattaactacaccaattggcggaggcattcgttctttaaatgtagcattaagacaagaactagatttatttacttgtcttcgtccagtgcgttggtttaaaggtgtaccttcaccagttaaacgtcctcaagatgttgatatggttatcttccgtgaaaatactgaggatatttatgcaggaattgaatttaaagaaggaacagaagaagttaaaaaagttattgacttcttacaaaatgaaatgggtgctacaaatattcgttttcccgaaacttctggtattggtattaaaccagtttctaaagaagggactgaacgtttagtaagatctgctattcaatatgcaattgataataatcgtaaatcagtaacattagttcacaaaggtaatattatgaagtttacagaaggatcatttaaacaatggggttatgatttagctcataatgaattttctgataaagtatttacttggcaacgatatgatgaaattgctgaaaaagatggtaaagatgctgcaaatgacgcacaacaaaaagctgaaaaagatggtaaaattattattaaagattcaatagcagatattttcttacaacaaattttaacacgtccagcagaacatgatgtagtagctacaatgaacttaaatggcgactatatctcagatgcacttgctgcacaagtaggaggaatcggtattgctcctggtgctaatattaactatgagacagggcatgctatttttgaagcaacacatggtacagcaccaaagtatgctaacttaaataaagtgaatccatcatctgaattattaagttctgtattaatgttagaacatttaggatggcaagaagcggctgataaaattactgatgctattgaagctacaattgcttctaaaattgtaacatatgattttgctcgtttaatggacggggctactgaagtatcaacttcagaatttgccgatgaacttattaaaaacttaaaataaatataatatttattttgataaaacagtctaagatggattttgatgtcttagactgtttttttgttcattattaataaatatcatagcaagattaacaaaaatatccttaacaaatagaaaatattaagtaaatgttaagtttatgtaaattcaatatgttgtatgttatttttatttaaatttcagttataataaaattgaaattgttaattctatttagggaggcaaatcatgtcacaaaaagtattagtggttgatgacgagcaatcaatagtaacgttactaaaatataacttagaaacagcaggttatattgtagatgtagcgtatgatggtgaagaagcactcaaaaaagttaaagaggttaaacctgaactgattgtattagatgtcatgttacccaaaaaagatggaatagaagtatgtaaaacgattcgatctgataaaaatcttgtacctattttaatgttaacagctaaagatgatgagtttgatcgtgtgttaggcttagaattaggtgctgatgattacatgactaaaccattctctccaagagaagttgtagcgagagtaaaagctattttaagacgctctcaaattgctaatgaagtcgtaaaagatgacgtggatgatgaagatattgtaattgataatattagaattcgtcctgaattctttgaagtctatagagatgataccttgcttgaacttacacctaaagaatttgagttactactttatcttattgaacgtcaaggacgcgtaattactagagaacatatgttaaattcagtgtggaattacgagtttgcaggagattcaagaattgtagatgttcatattagtcatttaagagataaattagaagaaaatcctaaacaacctaagttgataaaaacagtgcgtggattgggttataaattagaaagacctaaagcttaatgattaaatttcatcatagattattacttctactatgtacaataacaattattagttttataggtttaggtgcaattcttcatcatacgatttatcaaatattatcagatactcaaactagagaattaaatcatctatcagaaaatatcgtaaatttaaataatcgaaataaacaagcagacattcagcgtatagcacaaaatcaaaacttggttgttgaaatttctgaaaatggacatgtgttatatcaaactggtaatcaacatcaaattaatcatactattgataatgcagctaatccttcgaatattatatatcataaaaataaggataaagtggattacacatttaaaaatactgtaagtaataaaacaatatacataagtggtattaatactgaaattttagatttacaaaaaaatatgtggaagtacttatcattaattggaatcattgtgttaattgctatttatttagctgtaagaagcattaatcgcacctatataagaccaatcaacgaagttacttatgcgacatctttaattgcagatggatattatcatgttagagtacctgaaagtaatgtgaaagaaacaaaagcattatttgtcactaccaatgatttagcaagacgattgcaaaaattaaataataaacaaaaaatgcaatctaatcgtcttaaaacaacattagaaaatattcctagctcggtattaatgatagataagcaaggtgaaattgttattgcaaaccatgcttattacgaggtattcaaaccagatagtaaagtcgaaaataaagattatactgtacatttagataaagaaattcaacatcttgttattgaaagctttaaaactgaaaaaccgttgcatgaacaaattgagttatacattaatgatgttcatcaaaaatattttgatgtttcttgtattcccatcttaagtaaagcaaaaaagaaacttcaaggtatggttgtagtattacatgatatcactaatttaaaaaaattagaaaatttgagacgtgagtttgttgcaaatgtttcacatgaacttaaaactccaattacttcaattaaaggatttgcagaaaccttaattgaaggtgcaaagaatgatgaacaatctcttgaggtgtttttaaatattattttaaaagaatcaaatcgtatagaatcacttgtcatggatttattagatttatctcatattgaacaacaaactgagattgagactacttatgttaatctttcagatttagcacataatacaatccataatctacaaactcaagctaagtataaaaacatcgctattaaatctgaaatagaaaatgatgttattattgaagcgcatgaaggaaagttgtctcaagttatcacaaatttactttcaaatgccattaactattcgtacgaaaataataaagttattgttagagtttacagagaagatataaaagttaatctagaaatccaagattatggcattgggatagacaaaaaagatcaaaagcatatttttgagagattttatagagtagataaagcaagaagtcgtgactctggtggaacaggtttaggattatcgattacaaaacatattgtagaagcacttcacggtacaattatggtcgaaagtgaactgaataaaggatcgctatttagagtctcatttatagataaaatcgaataactattttgtcctacaattttaggtcatccacactttaaaatacttttttatgtttttagaattttaaaaggacctaaacttgtaggactttattttttgaaattcgtaaaatatcgttcagtcgttatgaccaaaggtttatgctaaaatataattaaactcattctggaggtttaaaatttgaataaattagtattgatagatggcaatagtttaagttttagagctttttacgcattgccacttttatctaataaagcagggattcatacaaatgcgattcttgggttcgccaaattactcgaaaaaattatcagagaagaacaacctacacatttcttagtagcctttgacgcaggtaagactacttttagacattctaaatatagtgaatacaaaggtggacgtcaaaaaacaccacccgaattaagcgaacaatttccctatattcgacaattgttagatgcttatcatattaaacattatgaattagaaaactacgaagcagatgacattattggtacgctaagtaaagaagcagatcaaaatgattttgaaactattattgtaactggagatagagacttaacacagttagcaactcaaaatgtgactatttattatactaagaaaggggtcacagacgttgatcactatactccagaatttatagcagaaaaatataatggtttaaaaccaatacaaattattgatatgaaaggtttaatgggagatagttcagacaatatacccggtgtagctggagtaggagaaaaaacagcaattaaacttttaaatcaatttgattctgtagaaggtgtctatgagaatattgataaagtatctggtaaaaaattaaaagaaaagctcgaacttagtcatgaagatgcattaatgagtaaagagcttgctacaattaatcgctatagtccaatagaagtcactttaaatgatactaaattaagtgatatcaacgataatcatgaaaaaattgaactttttaagaaattagaatttaaacaattattagcagatatagataataaagcatctgagtttgagcaagaacaaaaacaagtttcttttgatattttgcctacttttgaatatgttgattttaatcatcttgatgaagcagtgattcatttcgaaatagatggttctaattatttaaaagatgatattttaaagtttggattttatgataaagaacgttatatcgtagttgatgcagataatattaaagattatccagaacttattaaatggttagaaaatgaaaattctaaaaaggtagtttatgatgcaaagaaaacatttgttatagcacacagattaaatatcaacattcaaaatatcgtttttgatgcgatgttagcaagctacattattgatccatcacgaacgattgatgatgtctattcggttgtaacaaattatcatcaaacgtatgttaaagaagatgtctctatttatgggaaaggtaaaaagcgacatgttcctgatactgaaattttaaatacgcatattgcatctattactaaatctattgatgctgttaaaccgttaatggaaaaagaactagaatcacatcaacaaatgaatttactaaaagatttagaacttccgctagcacgtattttaagtaaaatggaagaaattggtatttatacagatgtaaatgatttacaacgcatgcaacaagaattacaagagaagttagaattgttagttcaacgtattcatgacgcagcaggtgaagaatttaacattaattcacctaaacaactcggtgtggttttatttgaaacattaaaactacctgtcattaaaaaaacaaaaactggttattctacagcagtcgatgttttagaacagttacagaatgaacatcctatcattaatgatattttggaatatcgtcaattagctaaattacaatctacttatgtggaaggtttacaaaaagtcattagtaatgataagcgtatacacactcgttttaatcaaacattagcacaaactggacgattatcttcagttgatcctaatttacaaaatatacctattcgacttgaagaagggcgtaaaatacgtaaagcatttaaaccttcatctgaagacagtgttattttatctgcagattattctcaaattgaattacgtgtcttagcgcatattacacaagatgacagtttaaaagaagcattcattcatggacaggacattcatactgctacagcacgaaaagtatttggtgttgaagcggaggaagtcactgatttaatgcgtagacaagccaaagctgtaaattttggaatcgtttatggtattagtgattatggcttaagtcaaagcttaaatataacacgtaaagaggcaaaaatatttattgatgattatttagcaagtttccctggagttaagcaatatatgagtgacattgtaaaggatgctaaagcaaatggctatgttgaaacattattgcatcgtagacgttatattcctgacatcactagtcgtaattttaatttaagaggttttgcggaacgtacagcaatgaacactccaattcaaggaagtgcagccgatattattaaacttgctatggtggaatttgataagcaagttcaacatacgtcttacaaagctaaattacttttacaagtacacgatgaattaatatttgaagtgcctaagtctgaagttgaagaatttagtttatttgttgaagatataatggagcatgcattagacttagatgttccattaaaagtagactctaattatggtcctacttggtatgatgcgaaatagaaagaggaatgaataatgccagaattaccagaagttgaacatgttaaaaggggaatagaaccttttattgtaaatgctacaattaaaagtatttcattttctaaaaaagtaattgaaggtaaaagtcagaataaagaaacgattatcaaaggaatgaatttagatggttttcgtttgaattgcgaaggctataagataattaaagtcgaacgaagaagtaaatatattgtttttcatattgaaaaacataatcgtaaacgtgtgttacttagtcatttaggtatggctggtggatttttcattgtcaatcacctatctgagatagcaattcccaactatcgtaaacattggcacgtgattttccatttaaataatggaaaaaaattagtgttttcagatatacgtcgatttggtgagattagaaacctaaattcatttgaagattatccttcatttttagaaatagcgcctgagccttttgacgaagaagcgttacaacattttaatcactatttatctcaaaaaaaagtagccaataaacctattaaacagatgttactggatcataaaatcatagcaggatgtggaaatatctatgcttgtgaagcattgtttagagcaggtatccatcctgcgagaaaagtaaaagatacgtctcatcaagaaagacaaatgctcttttattatgtacaagaagttttaaaagagggtattgataatggtggaacaagtatttcagattatcgtcatgctgacggaaaaactggaaaaatgcaattacatttaaatgtatacaaacaaaagacatgtaaagtatgtggccatgatattgaacaaaaagttatagcatctagaaacagtcatttttgtccatattgtcagaaataaataaagtgagcggtgatacaaatgcctaaagtaattggattaacaggtggaatagctaccggaaagtcaacagtttctaaattattatcagaatatggatttaaaattgtcgatgcagatatagcttcaagaaaagcagtagagaaaggatcaactgctttggaacaaataaaagaaacgtttggtgacgaagcaatcacaagtgacggagaaatgaatcgacaatacattggagaattagtatttaatcatccagaaaaacgattagaacttaatgaaattattcatcctattgtaagaacgattatggaacaagaaaagcaacagtatttacaacaagggtatgatgtgattatggatattccgcttctgcttgagaatgatttacaagatactgtggatgaagtctggctggtctacacatctgaaagtgtacaaattgaacgtttaatgaaacgtaacaatttagacttgaatcaagcaaaagcgagagttcatagtcaaatatcaattgataaaaaaagcagaatggctgatcatgttatagataatttaggaagtaaatctgaattagaaacccttcttaaacaactattgattgaaaaaggatacattcatgaataatatgagaaaaagagtttaggactttatttttagtcttaaactctttttatttatataataaatatattagttatataaacttaaaatgtaaaaaatattacattatttttggtaaacgctttcaatcggaatctattatgttatactaattttataaagtataacatataaaacaaggggtgctttaaatgtcaacaaatattgcaattaatggaatgggtagaataggaagaatggttttaagaattgcattacataatgaaaattttaatgtggttgcgattaatgcaagctatccacctgaaacaattgcacatctaattaactatgatacaacgcatggacgttatgataaaaaggtagaaccaattgaggatggtatacgtgttgataaccataacattaagttagtgtcagatagaaatcctgaaaatttaccatggaaagatttaaatatagatatcgtaattgaagcaactggaaaatttaatcatggtgataaagcagttggacatattcatgctggagctaaaaaagtattactaactggcccatctaaaggtggagaagtccaaatgattgttaaaggggtaaatgatgacaaattagatgttgaaaagtatgacattttcagtaatgcttcatgtacgacaaattgtataggaccagttgctaaagttttaaatgatcaatttggtattgtaaatggattaatgactactgttcatgcaattactaatgatcaaaaaaatattgataatccccataaagatttacgtagagcacgttcatgtaatgaaagtattattccaacttctactggagcagcaaaagcattgaaagaagttttaccagaactagaaggtaaacttcatgggttagctttacgtgtgcctacaaaaaatgtttctttagttgatttagttgtagatttagaaaaaccggtaactgttgacgaaattaataatgcatttcgtcattcagatttagatggtgttttagaagtagaaaatgcacctttagtatctgtcgatttcaatacaaatccacattcagctattatcgatgctgagaatacaattgtaatggatgatcataaggtgaaagtgattgcttggtatgataatgaatggggttattctaatagagtagtagaagtagctgaaatgattggtgaacaactagtagaaaagtctaccgtgactgcagtttaagcttttaataagtaaaagattgttaattttagagttgatattctaatataatgtcattgattttatagattaaaaaattataaaacattaaataatttttttaatgagtcatatgtaggaaagtgaaaaaagaatttatattgaattctatttcactttcctttttatattttattataagtttagacagctaagttgtatcaatttattatcaatacatatgagttcttttgtcataaatcgtttttatagtataatgaagcataatctattcaagagggtgacagatatgaaatgcccaaaatgtagtgccacacattcacgcgtggtagattcaagacatgctgatgaagctaacgcaatacgtagaagacgtgaatgtgagaattgtgggacaagatttacaacatttgaacatattgaagtgagtccacttattgtggtcaaaaaagatggcacacgtgaacaatttttaagagaaaaaatattaaatggtcttgtaagatcttgtgaaaaaagaccagttagatatcaacaattggaagacattactaataaagtagaatggcaattacgcgataaaggtcatacagaaatttcatctagagatataggtgaatatgtaatgaatttgctcatgcatgtagatcaagtctcttatgtacgatttgcgtcagtatataaagagtttaaagatgtggatcaattactagcatcgatgcaaggtattttggatgataacaaacggagtgattcataaatgagttttaaatcttatgagtatggtttaagtccacacgatggatttaaagtatatcgacattttttctttaatcatcaacaattagagatattaaatcgattgtacataccgttaattggctttaaagctattggtgtatatcatttcatgaaccaatttatcgatgaagttgaagatactattctcacacattacactatcatgaatgagcttaaaataaatttattagaattccgtgaatatatggatttacttgaaggcattgggttaattaaaacatttgtaaaacatgatagtaatcagtcattgtttatatatgaattgattcaacctccaacggcataccaattttttaatgatccaatgttatctatatacctatacaatgaagttgataatcgaagatataaagatttaaaagcgtattttgaaaaagatgaaccagatttaaaagaatttcagcaagtaacgcgcaaatttactgatgtattcaaagttccacataaaaatatatctattgatgcttcaacaattcaaaaggaaaatcattcagctactatagatttagataatgaatcatttgactttgatatgttgagagatatgttacaacatcattttataagtggagaaattattactaaagaggcaaaacaattaattttacaattggctactttatatgggttaacgcctacttctatgaaacgaatcattcttaactctatcacacaaaatcaaacgttatcatttgaagagatgagaaaacaagcaaggtctcattacttaattgagcatcaacaacagcttcctaagttacaaactaaagctaatccttctaatcatttagaacaatcacagcgtccaaatgagactactgatgatataaaggaaagtgatagttggtttaagttattagaaaacacaagtcctattgatatgttagcgtcttggtctgaatcagaaccaactttacaacaaaaaagaatggtagaagagttaatagagcgtgaaaaattgtcatttggtgtaattaatattttattacaatttgtaatgcttaagaatgaaatgaaacttcctaaatcctatatatttgaaatcgcttcaaattggaaaaagttaggtattaaaactgcacaacaagcatatgattatgcgctgaaaacaaatcaacaaatcaatgatagtataactaaaaaaacaaaacgtcaatataaacaacgtgacgttgcatcaatagaaaaaacaccaaaatggttaaaagataaaaaccaacaagatgaaaaaccaaacaataatgatgcgcaatttgaaaaagatagagaagcgtttcgtgctcaattagaacaagattgggaggattagatgaaaccatttagtaaacttataaaaaatcaagataatttaaacaaaagaattgctaaaataaaacatcaagtcattaatgattctgatgttaaacaatttttaaatcaacaccagtcagaacttactaatgaaatgattgataaagatttaaatgtacttcaagaatataaagatcaacaaaaacactacgatggtcacgattatgcacactgtccaaactttgttaaaggtcatattccagaattatatatagaaaatgagcgtattaaagttcgttatcgattatgtccttgcaaaattaaatacgatgaagaacgtttaagttcacaactcattactgctcatcacatgcaacgagatacgttaaatgcaaaagttaaagatatctatactaacgatagaagtcgacttgaaatagctatggaagttaacgatatttgtaaaaagttagttaacggtgaacgcgttaagggtctttatatacatggcccttttggaacaggcaaatcttttattttaggagctatcgcaaaccagcttaagtcaaaacatgtgccatctacaatagtatatttacctgaatacattcgtatactaaaaggtggttttaaagatgggagttataatgaaaagttagagcgtatacgagaagcaaatatattaatgttagatgatatcggagctgaggatgtcacaacatgggtaagggatgaggtgataggtcccttattacattatcgtatggttcatgaattaccaacattctttagttcaaatctaaatttggaagaattagaacatcatttatctatatcaaacaaaggggcagaaataacgaaagctgctcgaattatcgaacgtatcaaaagtttagcaaatgaattttatttagatggaaaaaatttacgaaataattgaaatttacaatgtgtgatgtataataaagataaatctaaatcgttgaaataaatgaagatatgataatttaatctctatcatacagcaagccaacaattgatgagaatttggttgatatattaaattattactccttcatatttagatgctggtaatcagtatccggctcaagaccgttatcttatgaagagatatctagaatacatctagataactagggtggtaccgcgacgaactcgtcccttttatagggaggagtttttttattttcttcagcgatcatagaataaaatttatggagggtttcgatatggaacaaattaatattaagtttccagatggcaattcaaaatcatttgataaaggaactactacagaagacattgcacaatcaattagtcctggacttcgaaaaaaagcagtagcaggaaaatttaataatcaactcgttgatttaactcgtccacttgaagaagatggggcaattgaaattgttacacctggtagtgatgaagctctagaggtattacgtcattcaactgctcatttaatggctcaagcattaaaacgaatttatggagatgttaaattcggtgttggtccagtgattgaaggcggtttttactacgactttgacatggatgaaaaagtatcatcagatgactttgaaaaaatcgaaaaaacaatgaaacaaattgttaacgaaaattataaaattgaacgtaaagtggtttctcgtgaagaagcaaaagatttctttaaagatgatccatataaattagaattaatagatgcaattcctgaagatgagaatgtaacattatatactcaaggtgaatttacagatttatgccgtggtgttcatgtgccatcaacttcaaaaattaaagaatttaaacttctttctactgcaggtgcatattggcgtggggatagcgacaataaaatgttacaacgtatatatggtactgctttctttgataaaaaagatttaaaagcatatttagacatgttagaggaacgtcgtgaacgtgatcatcgtcgtattggtaaagatttagaattatttacaaataatcaacttgttggtgctggtcttccactatggttaccaaatggtgcaacaattcgccgtgaaattgaacgttatattgtagataaggaagtaagcatgggatatgatcatgtatataccccagttctagctaacgttgaactttataaaacttcaggtcattgggatcactatagagatgatatgttcccaccaatgaaattagatgaaactgaagaaatggtattacgtccaatgaactgtccacatcatatgatggtttataataataaaccacattcttatcgtgaattaccaattcgtattgctgaattaggtactatgcatagatatgaagcaagtggtgcagtatcaggcttacaacgtgtaagaggtatgactttaaatgattctcatatctttgtacgtcctgaccaaattaaagatgaattcaaacgcgttgttcatatgatacaagatgtttatgaagactttggttttgaagattacacattcagattaagttacagagatcctgaagataaagaaaaatatatggacgatgatgacatgtggaataaagctgagtctatgcttaaagaagcagtagatgaaatgggcttaccatatgttgaagctattggagaagcagcattctatggtcctaaattagatgttcaagttaaaactgcaatgggtaaagaagaaaccctttcaactgcacaacttgatttcttactacctgaacgatttgatctttcttatattggtagtgatggtgaaaatcaccgacctgttgttattcatcgtggcgtagtttcaactatggaacgttttgtagctttcttaactgaagaaactaaaggtgctttcccaacatggttagctccaaaacaagttgagattattccagtaaatgtagatttacattacgactatgcgagaaatttacaagatgaattaaaatctcaaggtgttcgtgtagaaattgatgatcgtaacgaaaaaatgggctataaaattcgagaggcacaaatgcaaaaaattccttatcaaattgtagtaggagataaagaagttgaaaacaacgaagtaaatgttcgtaagtatggctcacaagatcaagaaacaatagaaagagatgaatttatctggaacttagtagatgaaattcgtctaaaaagacgtagatagtcttgataaaataatatccttaatgtatattacaaagtagttaaataaaaatgagttagaggttgcatctttaaaaagtaatacttcagaagttgatatggaacgtatgttgaaagtatgaaaggtaaagatgccgaaacaaatgataaccatacttatgatttgttgggacagttatcgaatagaaactgtactgtcacagtttgtgatgtgctaccgacatagattaagtaatgggtgcatatcttaacggtatgtacctattttttaatttgtaatttgatttacatatcatttataaaaattaaatatgttaattatcttcacataacaaataaatacttagctaacctctacattaagaaagggagcttatatgagtaaagttgaaaatcaagatagcggtatgaagagagggttaaaagatcgtcatatctctatgattgcaatgggaggctgtattggtacaggcctatttatgacatcaggtggtgctattcacgatgctggtgcattaggtgcgcttattgcatatgcaattattggagctatggtattctttttaatgacttctttaggagaaatggctacgtatttacctgtttcaggttcatttagtacctatgcaacacgatttgtagatccatcattaggattcgcattaggttggaactattggtttaactgggtaattactgtagcggcagatgtaactattgcagcgcaagtcattcagtattggacacctatggcagggataccagcatgggtatggagttgtatctttatagttattattttcgcattaaactctttatctgtaagagtatatggtgaaagtgaatattggtttgcacttataaaagtgattacagtaattatttttataattattggtattttaactatattaggaattatgggtggacattttgtaggatttgaaacatttactaaaggtgatgggccaatcctaggtggaaatcttggcggtagtttactttcaatcctaggtgtattcttagttgctggtttctcattccaaggtactgaattaataggtattactgctggagaatctgagaatccagaacgtgctgtcccaaaagcaattaaacaagttttttggagaatattattattttacatcttagccatctttgttattggtatgttaattccttataatagtaatgctttaatgggtggagataacgatgttgcaacatctccatttacgcttgtctttaaaaatgcaggcttagcatttgctgcttcatttatgaatgcagttattttaacttcagtattatcagctggtaattcagggatgtatgcatcaacacgtatgttatattcaatgagtaaagataaattagcattcgcttcgtttggtaaaacgaataaacacggcgtgccatatttatcattgattgctactggtgtacttgtagtcgttattttcttagtacaaaaattaagcggaaatgcttatgaatacattgtagctgccagtggtatgacaggctttattgcttgggtaggtattgcagtaagtcactatcgctttagacgagcatttaatgttcaacatcatcgtaaatcagaattgaaatataaagcgaaatggttcccattcggtccaatatttgcaggtatattgtgtgtgattgtgattgttggacaagatgtggatttcattaaaacagggcactttgatcttaatcgatttattattacgtatatgggtattccagtatttttagtattctttatttatcataaattaagatataaaactaaaaaaatacctcttgaagaagttgatttaagccaagatgtctcaatgaatgaagtaaaacatcactaattttaaaaaacaattgacatgcttaataaaacttgatatgattagtatcgttgattacgaaacgaaccaagtagaaacacccgtttctcacctgtagcgacgcaaaaagctgttggcaggttaatcatgtcacacaattattgtgtatgagtgaagagcgggcaaatattgtccgctctttttgcttgggaaaatttcgtaaaattttgggaggtgtcaaccatagcaaaaaatcaaacgcaagttaacgaaaaaattcgcgcaaaagaattacgtttaattggccaaaatggtgaccaaattggtgttaaatctaaaagagaagctcttgagatggctgaaagagttgaattagatttagtagttgttgcaccaaatgctaaaccacctgttgcaagaattatggattatggtaaatataaattcgaacaacagaaaaaagaaaaagaaatgaagaaaaaacaaaaagttatcaatgttaaagaaattcgtttaagtccaactattgaggaacacgatttccaaactaagttgaaaaatggacgtaaattcttaactaaaggtgacaaatgtaaagtttctattcgtttcagaggtcgtgcaattacacacaaagaaattggtcaacgtgttttagaaaaatttgcagacgaatgtaaagatattgccactgttgaacaaaaacctaaaatggaagggcgccaaatgtttattatgttagcgcctgtaaacgaaaaataatttacttttattaggaggaaatgaatcatgccaaaaatgaaaactcaccgtggagcagctaaacgtgttaaaagaactggttcaggtcaattaaaacgttctagagctttcacatctcacttatttgcaaataaaaatactaaacaaaaacgtaaattacgtaaagctaaactagtatctaaaagcgatatgaaacgcgtaaaacaattattagcttacaaaaaataattaatattactttcgaacgatgataaagcgatatatttaaggaggaatttaacatgccacgagttaaaggtggaacagtaacaagagcacgtcgtaaaaaaacgattaaattagctaaaggttacttcggttcaaaacatacattatataaagtagcaaaacaacaagtgatgaaatcaggtcaatacgcattccgtgaccgtcgtcaacgtaaacgtgatttccgtaaattatggattacacgtattaatgcagctgcacgtcaacatgacatcagctattctcgtttaatgaacggcttgaaaaaggctgacattgacattaaccgtaaaatgctttctgaaattgctatttcagacgataaagctttcggtgaattagtatcaaaagctaaagatgctttaaaataattcatatttaaaagccaataaggtaactataaaaccttattggctttttttatttacttttattcatcaaatattctttaatagaattatgataagtaaacgaaccagttaaatatcattgtgatttaaatcattggtttgttaaactattaaaaaagaatattaatttcaaggagttaactatgtctaaatttgatgaacaaatcatcgtcgtatcaagagaattattatttaataatgaaaaaaatgcatttaatggattcttatcgaaaaacgatggtcaaggtgaagaaatatttaatacgtttaaaaattatgaagtaaaaagacgtggagatatggaagaagatccatcttataaacaacttatttcatattgtcttttagaaaatgaaaatgatgaaatcttagtatatcaacgtttaagtggtggcggagaagaacgcttacacggacagtcttcagtgggtgttggtggacatatgaataatgttgttggcgccgattcaattaatgaagttttaagagtgaatgcacaaagagaacttaatgaagaagtaggattatctgaagatagatctcaaaatatagaatatattggttttattaatgatgatactaatgcggtaggtaaagttcatataggtgttgttttcaaaattaaggtgaaatctagtgatgtagaagttagagaaaccgacactttaaaaattaattgggtatcacaagatgaaataaatgatttaaatcattttgaatcatggagtgcgttaattttaaaagatttaaaataaagggggctcaatatgtctgatattatcccttttcctcaatcaaagcaaaaattatatcataatattttaaatgcacaacaacaaaataaatataaagaaatgtatcaattgtttgatatatatgaagcctcattcgaattagataatcaattatctttgattaaatgtgacatgttaaatgaattagggttatatttagaattaagagaagaagcaattattttcttaaaaaaaggtatacctcattacgacgaactgattattttctatattaaagcattaataggtttaaatcagaattatgaagcaattgaagtcattaatcaaatcattaacgaagtgaaagaacataaaactagaatggcactctttccattaaaagaatatgcacaatctaaattagatgaagacaagaaactttctagtcaattattatcagaatttactagtttagatttaaatcgtcaaactaaattaatgattaaactcattgataacggacattatgaattcagaaagacggttgcttttttattatctaatcaagtagaatcttataatttgaaaagtctcatgcttgagtatttacgtttttcaaattatgatagtgaaataaaaattgagaagtatggttatgaagtcaacatcttacctacaacattaaaaggtttagaacacacagatatgaaaactactgttattcccaaagttctcgatagattagaaaatggagctttgaatatacaaaatgaagctcagtatgtgatgaataatcattcaataaaactatatccacttgatatattttcactttttaatgaagaagattggataatagcttatgatgtttattttaagtcaatgattggtatagaagtaagtgaagcaaatcaagaattattagcattaatttatcagttagataattaaatgtgagcaaatcattttagtttacttaaatgattctgtaaagttgaattattatttaaaatcgcctataaaacattgtttgtgtccatattggacctatgatataatagggaagttgaaaaaattaaaaatgtaagcatggaggtatttatacatgacagcaacttgggaaaaaaaagaaggtaacgaaggtttattaaaagttactgttccagcagaaaaggtaaataaagcattagatcaagcatttaaaaaagtggttaaacaaattaacgtgcctggtttccgtaaaggtaaagtgcctcgtccaattttcgaacaacgttttggcgttgaagcattatatcaagatgcagtagatattcttttacctgaagcttatggtgaagctattgaagaaactaaaatcaatccagtcgctcaacctgaaattaatgtaactcaaattgaaaaaggtaaagatttcgaatttgaagcaacagtgactgttgaacctgaagttaaattaggagattataaaggtcttgaaattgaaaaacaagattctgaattaactgataaggatttacaagatgcaattgatcatagtttaggtcatttagctgatatggtagttaaagaagatggtgcagttgaagaaggagacactgtaaatattgactttgatggttatgtagatggcgaacaatttgaaggtggccaagctgatggttatgatttagagattggttcaggttcatttattccaggatttgaagatcaattagtaggcgttaaaactggagaagaaaaagatgttgttgtaacattcccagaagaatatcacgctgaagaattagctggtaaggaagctacattcaaaactaaagtaaatgaaattaaatacaaagaagtacccgaattaactgatgaaattgcaaatgaattagattcagatgctaattcagtagatgagtataaagaaaacttacgcaaacgtttatcagaagaaaaagcacaagatgctgaaaatgtggaaaaagaagaagcaattaataaagcaactgaaaatacaacaattgatattccacaagctatgattgacactgaattagatcgtatggttcaagaatttggtcaaagaatccaacaacaaggtttagacttacaaacttacttccaaatttctggtcaagatgaatctcaattaagagaacaaatgaaagacgatgcagagcaacgtgttaaaacaaacttaacattatcagcaattgcagatgaagaaaatatcgaagtcacagatgaagatattgataaagaattagaaaaaatgagcagtcaatttaatatctcagtagaagatattaaacaaactcttggtaatactgatatcattaaaaatgatgtacgtattcaaaaagtaattgatttattaagagacaatgctaaatatgttgattcagctaaagacgataaaaaagaagacaaataataaacttttaaattgatataaagtttaaaaaataagtagcaggtgcatcattatatgtatctgctactatatgttttaagcattttagttgttaactatcaatttgcattgtagaatgctatctagtatagtcgtttaaggatagaggtgtaaatgaatgtttaaatttaatgaagatgaagaaaatttaaaatgttctttctgtggtaaggaccaagatcaagttaaaaaattagtagcaggcagtggtgtatatatttgtaatgaatgtatcgaactatgttctgaaattgttgaagaagaattagctcaagctacttcagaagaatttactgaattaccgacgcctaaagaaattatggaccatttaaatgaatatgttattggccaagaaaaagctaaaaaatctttagcagtggcagtttacaatcattacaaacgtattcaacaattgggtccaaatgaagatgatgttgagttacaaaaaagtaatatcgccttaattggaccaacgggtagcggtaaaactttacttgcacaaacacttgctaaaacattgaatgtaccatttgctattgcagatgcaacaagtttaactgaagcaggttatgttggtgatgatgttgaaaatattttactacgtttgattcaagctgctgattttgatattgataaagcagaaaaaggaattatttatgtagatgaaattgataaaattgctagaaaatctgaaaatacatcaattacgcgtgatgtttctggtgaaggtgtgcaacaagcattacttaaaatcttagaaggtacaacagcaagtgtaccccctcaaggtggccgtaaacatcctaaccaagaattgattcaaattgacacaactaatattctatttatattaggtggtgcgtttgatggtattgatgaagtaattaaacgccgtttaggtgaaaaagttatcggttttgctagcaatgaagcagataagtatgatgaagaagctttattagcacaaattcgtcctgaagatttacaagcatatggtttaattccagaatttattggacgtgtaccaattgttgctaatttagaaacattagatgttgaagcacttaaaaatattttaacgcaacctaaaaacgcgttagttaagcaatatacaaaaatgttagctcttgataacgttgaattagaatttactgaagaagctttggcagcagtcagtgaaaaagcaattgaacgaaaaactggagcacgtggattacgatcaattatagaagaatctttaattgatattatgtatgatgtaccttcaacaagtgatgttgctaaagttgtagtaactgctcaaacaattaatgaggaaatcgagcctgaaatgtatgattcagaagggaatttattgaacggtactaaaacttcagcttaattatcaaccatataataaggaagtggtgatagaattcatttgagttcgaaactgcttccttatttttatacatatcatttttttaaaattttagatttttaaacatttatattataataaagcagctataacaatgaagaggtgtttgaatatgaatattaacccaaataatatagaattaatgattagtgcagtgaaagaagaacaatatcctgaaaccaatttaactgaaatcgctttaagtggacgttctaatgtgggtaagtcctcttttattaatagtatgattggtagaaaaaatatggctcgtacttcacaacagcctggaaaaacgcaaactctaaacttctataatattgatgaacaacttatttttgttgatgttcctggatatggatatgcaaaagtaagtaaatcacagcgtgaaaaatttgggaaaatgatagaagagtatttaactaaacgagaaaatctaggtttagtcattcaacttgtagatttacgacataatcctaccgaagatgatgtattaatgtataattatttaaaacatttcgatctggcaacactagtcatttgtactaaggaagataaaattgcgaaaggtaaagttcaaaagcatataaaaaatataaaacaaaaattagatttagatccaaacgatacaattataagttactcttctattcaaaattctaaacagcaatatatttgggatattattgctaattatataaattaaaagacatatcttgtaattaagtgacaaaattttgacttcacattagaatgtttctaatttatttgagcatcaaacttaaattcattctaaaatgtgttatactaacaatattgttagtatatggagggcgttataaatgcattttattgctattagcataaatcatcgtactgctgatgtagctttaagagagcaagttgcttttagagatgatgccttacgattagccaatgaagatttattcgaaactaaagcaattttagaaaatgtaatattatcgacatgtaatcgtacagaagtatatgctgtagtggatcaaattcatacaggacgatattatattcaacgatttttagctcgttcatttggatttaaagtagatgatattaaagcaatgtctgaagttaaagtgggggacgaagcagtagaacatctattgcgtgtaacttcaggtttagattcaattgtgttaggagaaacacaaattttaggccaaatgcgtgatgcatttttcttagcgcaagatttaaaaacaactggaactatctttaatcatctatttaaacaagcaattacttttgctaaaaaagcacataatgaaacagatatcgcagataatgctgtaagtgtttcatatgctgctgtggaattatcaaaaaaagtattaggtaaattaaaaaataaacatgctgttattattggtgcaggcgaaatgagtgaattgtcgttattaaatttactcggctcaggcattaatcatattacaattgtaaatcgaacagaaagtaaagctagaattttagctgaaaaacaccaagttagttatgataagctagaatctttacctagtttattaacttcaactgatattgttattagttctactagttcaccagattatattattactaaaagtatgattaatcaggcactatcatatagaaaatctaaattattattattagacattgcagtaccacgagatattgaaccatgtcataatttaagtgatgacgtatttaattatgatgtagatgatttaaaaggtttagttgatgctaatttaaaagaacgacaaatagcggctgaagctatttctaatgaaattcctactgaaattaaagcacataatgattgggtaaatatgttgggtgtagttcctgtaataagagctttacgtgaaaaagcaatgactattcaagctgaaacaatggatagtatcgatagaaaattaccgaatctatctgaacgagaacgaacagtcatttctaaacatactaaaagtattattaatcaaatgttgaaagatccaattaaacaagctaaggaattgagtaacgataaaaaaagtaatgaaaaattagagctatttcaaaatatatttgatattgaagccgaagatccttacaaagcagtgaaagaacgtaaaaaagaaaaggaactttcagtacgacatatctttagttttgaataagcatattaaaatggtgataatatgcaagaaacgctatttattagatttcatgaaattatattaattgtatatttaattagcattctttgttattttatagactttgttcggaagagtcataagattagagtacttggaatttatgccttagggattgtttggtttttacaaacaatctctttgtctatgtatattacttcgcatagtgatatattgtttaattccatatttgatgtttttttcttcttgtcatggatgattatttctatttctttagttttaaatattattaaagttttaagtttttctgtgttttttttgaatgtaattggatttatcttattaacgatgaatacatttagacctgaacactatacaaacagtatacaaagagtacaagttataaatgaattattacttgtacatgtagggcttgcagtattgagttatgctttttttgcacttgcatttgtaaatgcattgctatatatcattcaatataaaaaccttaaagaaaaaaactttaatcagaaatattttagaattggcagtgtagcaactcttgaaaaaattatatttttttcaactttgggcggtttagtgatattaatattgagtgtaattttaattgctcaatggggaatctatgcggttggtgtagcaatatttaaagatccgaaggttatgttgtctgtcattattacgcttctttatacaggatatatcgttatgtatttaaaaaagaaaatcatctcaattaatttaatttattttaatattatgatattttgcctatgtatggtgaatttattcttcactactcattttaattaaaagaaaacttatgtaggaggccttgtttatgcgtaaattagttgtgggttcacgtagaagtaaacttgctttaacacaaagtaaacaattcattgataaattaaaagccattgatccatctttagaaatcgaaattaaagagattgtcacaaaaggagatcgaattgtgaatcaacaactatctaaagttggaggaaaaggcctatttgttaaagagattcaaaatgagctatttaacaacgatatcgatatggcaatacactcattaaaagatgttcctagtattattccagaaggtttaacattaggttgtattcctgatagagaaataccatttgatgcctatattgccaaaaatcatgtaccattagaagaacttcctaaaaatagtatagttggtacaagttcattaagaagaggggcacaaatattatctaaatatcctcatctaaaaattaaatggattcgtggtaatattgatacacgtttaaataaattagaaacagaagattatgatgcgattattttagcagcagcaggactcaaacgtatgggttggtctgatgacgtagtaacaacttatttagataaagacacattactacctgcaatcggtcaaggtgctcttggcattgagtgtcgtcgtaacgatattgaacttctcgagttacttcaaaaagttcacaataatgaagttgcaaattgtgtaacggccgaacgaacatttttagctgcaatggatggaagttgtcaagttccaattggtggatatgcgaattataacaataacaatgaaattgagtttacaggcttaatcatgacaccagatggtaaggaacgttatgaacatactgaagtaggaactgaccctgtaaaattagggaacagagtaagtgagatacttaaagaacaaggtgcgtatgaaattataagaaaattaaacgaagaagcatcacattaatactaaatcttagtagaggtgttacagttagatgaaaccagtgatagttatgacgcaaacgagtaaagtacagagtgatatggtagaagtcattcataagccatttattaaaattcaatcacttgaatttgatactcaactcttgcatgataattatgactggcttattttttcttcaaaaaatgccgtacatttattttataaatatttagagtacgtgaatgtaaaacatattgcagtagtaggcgctaaaactgcgcagttatgtaaacaattaggtataaatatagattttatacctaacgattattctcaagaaggtttattagaaggattaaatctagaaaaatcttctattttaattccgagcagtgcacaggcaagaccaaaattgcaacaaacactcgctgaacataataatgtagtgaaaattgacttgtatacgcctatagcggatagagagaatattattgaagttatcaatctaattcaacataatcaagttgaagcattaacattttcaagttcatctgcagtgcgttattattttagtgaggcatttcctaagcattttaaaaattactatgctataggtcaacaaactgcaaatagcattagagcctatggttatgaaccttatattgcagataaacaaacttctgaagcattaataaacacatttttagaaagtaggaataaataatgaaattcgatagacatagaagattacgctcttcagctacaatgagaagtttagtaagagaaaatcatgttagaaaagaagatttaatttatccaatctttgtagtagaaaaagataatgttagaagcgaaattaaatcgttacctggtgtatatcaaataagtttaaatctattagatgatgaaattaatgaagcatatgagttaggtattagagcaattatgttctttggcgtacctaatgaaaaagatgatgtgggttctggtgcatacgatcataatggcatcgttcaagaggcaacacgtagagcaaaaaaacttcataaagatttattaatcgttgctgatacttgtttatgtgaatatacggatcatggtcattgcggtatcattgatgaacatacacatgatgttgataatgacaaatctttaccattattagttaaaacagcaatttctcaagtcgaagctggcgctgacattattgctccaagtaatatgatggatggttttgttaccgaaattcgacaaggtttagatgaagctggttattataatattccaattatgagctatggcattaaatatgcttctagtttctttggaccatttagagatgctgcagattcagctccttcatttggagatagaaaaacgtatcaaatggatccagctaatcgtttagaagcactaagagaattagaaagtgacttaaaagaaggcgcggacatgatgattgtcaaaccagctttaagttatttagatattgttagagatgtaaaaaataacactaatattcctgttattgcttataatgttagtggtgaatatgctatgactaaagcagcatctcaaaatggttggatagatgaagaacgtgtggttatggaacaaatggtatcaatgaaacgtgcgggcgcagatatgattattacttatttcgcgaaagatatttgtcgttacttagataaataatggttaaggaggaacaagttaatgacttatgaaaaatcacaagaagcaatgcgcattgctgaaacacttatgcctggtggtgtcaatagccctgtaagagcatttaaatcagtagatacaccagcaatttttatggatcatggtgaaggttcaaaaatttatgatatagatggcaatgaatacattgattatgtattaagttggggaccattaattttgggtcataaaaataaacaagtcattagtaaattacatgatgctgtagataaaggtactagttttggtgcttcaacactagaagaaaataaattagctgaacttgttattgaaagagtaccttcaattgaaaaagtaagaatggtttcttcaggtactgaagctactttagcggcattaagactggctagaggttacactggtaaaaataaaattgttaagtttgaaggttgctatcacggacatagcgattcattgcttatcaaagcaggttcaggtgtagcaactttaggtcttccagattcaccaggagtacctgaaggcacagctaaaaacacaattacagtgccttataatgatttagatgcgattaaagtagcatttgaaaattatggagatgatattgctggtgtgatagtagaaccagttgcaggaaatatgggcgttgtacctcctaaaaaaggtttcttagaaggattaagggaagtcactaaagaatatgattctttacttatctttgatgaagtcatgacaggtttccgtgtagggtataactgtgctcaaggttattttggtgtgacaccagatatcacatgcctaggaaaagtgattggcggtggtttacctgtaggtgcttttggaggcaaaaaagaaattatggataaaattgccccagtaggtaatatttatcaagcgggaactctgtctggtaatcctttagcaatgacaagtggttatgaaacactaagtcaattaacgcctgaatcatatgagtatttccaaaaattaggcgatatattagaaaaaggacttaaagaagtatttgctaaacacaatgttcctattacagtaaatagagctggttctatgattggttatttcttaaataaaggacctgtaaccaactttgaagaagcgaatcaaagtgatttagagctatttagtaatatgtatagagaaatggctaaagaaggtatatttttaccaccttcccagtttgaaggaacattcttatctactgcacataccaaagaagatattgaaaaaacgattcatgcttttgataatgcattaagtagaattgtttaatatttaaaagttaatataataaaagtggaacaaagatgaaatcatatcacgttccactttttttaatttaaatgcttttaatctagaaagaagtgatgatttttgaggcgaatttggctaaataatattatattattaataatagcgatgatcatgagtttaatattaaaattatctcatatgcttttaccctttatgtttgggcccattatagcctcaattattgtggttaaagtactaaaactaaatattaaatggcctttttggattagtcagattggcttaatattacttggagtacaaataggatctacttttacgtcacaagtcattaacgatatcaaaaatgagtggttaaccattgtgacggtgactgttttactcatcacgttatcattattgattgcttattttttcaaaaaaattgcaagagttaatactgaaactgctatcttgagtgtcatacctggtgctttaagtcaaatgttaattatggctgaagaagataaaaaagcaaatatcttagtagtaagtttaacccaaacttctagagttatttttgtagtcgtacttgtaccactgatttcttttttatttagcaattcatcatcaagtgaagagatgattcataaagctacaccattaacaagagctttaaatgtgccccaaattgccttaattatgattagtatagcttttgtttatttcttaatgtcaaaaataaattttccaacaaaacaattactcgctccaattatcgttttaattgtttggaacttatcaactcatctgatttttactttagataattatattcttgcttttgcacaagtgatttatatgattagaattggtttacaaattgcacatttattaggtgatttaaaaggtcgcattgctatagcaattatgtatcaaaatataagtttaattttagggtcatttttgatggtctttatggttcatttgtttactcataattcattaaacgaattatttttaggtggagctcctggaggtatgagtcaaattgtgctagttgccatagctactggtgcagatgttgctaagatatcaagttttcacatctttaggatattttttatattatttttagtagcaccaataattaattactttttaaaacgtaaaaaaaatgataatcaatcataaggagtagaactacgaattcaaaataatctgttctactccttttaatatttaatgattaggttttgaaggacatccttctaagtgagtatcatatagaccagccgcttctataaaagagaatacagtcacaggtcctaaaaatttaaaaccataagtttttaaatcttttgaaagttgttttgctctttcatcaactgtgatacgttctgaaggagttttatagtgcaaatcaatgggatgtccatcaacatatgaccataaaaacttactgaagctaccatattctttttcaatttgtaaataacccttagcttgagatactatggcttctaatttctttctattatgtacgatatttggaaaggtcattaaagcattaatatctttctctgtcattttagaaatttttataggatcaaattgatgaaatgctttttcataagcctctttcttttttaatatagttaaccaagataaaccagcatgttgagattcaagtgcaagtaatttgaaaagtgaaagactattaaaatctggttgtccccatactttattatgataatctaaataaatagggtctgtagttccaaaggcacatgcgttcataaatattcctccaaaagattgacttatcattgttttctattatattattaattagtaattaaatatattttttgggaagagtacgtttgatacttatcaaagagagcatatggacggtgtaaatatgtataatgatcaaactgaaggtagcccacaagttcttttattgaatacacatataatagtagatagaagcgtgtatgagcgttaatcataaataagtgcaagaagatatggaggtatcgtcttgaatttaggtggtaccacggagcatccgtcctatatattaggaaggatgcttttttattttaggaggttatttcaatgaaaatggaatcaaagtataatcctcgtgaagttgaagcggggcgttatgaagaatgggtaaaaaatgaatactttaaacctctagaagatgaatctagagaagcatatacaattgttattccaccaccgaatgtgactggtaaattacatttaggacatgcttgggatacaacattacaagatattattactcgaatgaaacgtatgcaaggatatgatacgctttatttacctggtatggatcatgcgggtattgccacacaagctaaagtagatgctaaattaaaagaacaaggtatttctcgtcatgatataggacgtgaaaaatttttagaacatgcttggtcttggaaagaagaatatgcatcttttattcgtaaacaatgggctaaattaggcttaggtcttgattatagtagagaacgttttactcttgatgacggcttaagtaaagcggttagaaaagtatttgttgatttatataataaaggaattatttatcgtggagagcgaattataaattgggatccagtcgcacgtacagcattgtcagatatagaagtgattcatgaagatgtgcaaggtcatttttatcattttaaatatccttatgctgatggtaatggatatattgaaattgccacaactcgtcctgaaacaatgctaggggatactgctatagtcgttaatccaaatgatgaacgttataaagatgtcatcggaaaaaaagtgattttaccaattataggtagagaattaccaattttagcagatgagtatgttgatattgaatttggtagtggcgctatgaaagttacacctgcacatgatcctaatgactttgaaattggtcagagacatcatttagaaaacattatcgtaatggatgaaaatggaaaaatgaatgacaatgcatctcagtatgctggtttagaccgtttcgaatgtcgtaaaaaattagtagaagatttaaaagctcaagatttagtgattaaaattgaagaacatatgcattctgtaggtcattcagaacgttctggtgcagtagtagaaccttatttatctacacaatggtttgtaaaaatgaaaccacttgcgcaacaagcactagataatcaaaaaacagataatcgaattgatttttatccaccacgttttgaaaatacatttaatcgttggatggaagaaattagagattggactatttctagacaattatggtggggtcaccaaattccagcttggtatcataatgaaacaggtgaagtatatgttggagaagaagcgcctgctgatatcgaaaattggactcaagatgaagatgtattagatacatggttctcaagtgcgttatggccattctcaactttagattggcctaatgaagaagcaaaagattatcaacattactatccaacgaatgttcttgtaactggttatgatattatcttcttctgggtagcaagaatgattttccaaggattagaatttactggtaaacgaccatttaatgatgtacttcttcatggtttagtaagagctgaagatggtcgtaaaatgagtaaatcacttggtaatggtgtagatccaatggatgtcatcgaaaaatacggggcagatagtttacgctacttcttagcaactggttcttctccaggtaatgacttacgttattctaccgaaaaagttgaatctgtatggaactttattaataaaatttggaatggcgctcgctttagcttgatgaatattggagaagactttaaagtggaagacattgatttatctggtaatttatctttagcgaataaatggattttaacacgactaaatgaaacaatagagaccgttactaatctgagtgaaaaatatgaatttggtgaagttggacgtgctttatataactttatttgggatgaattctgtgattggtatattgaaatgagtaaaataccaatgaatggtgaagatgaagctcaaaaacaaacaacacgttctgttctaagttatacacttgatcaaataatgagaatgctacatccatttatgccatttgtaactgaaaaaatttggcaaagtttaccgcatgaaggagaaacaattgtaaaagcagcatggccgacagttaaagaagagtttgtgtttgatgaaagtaaacagacaatggaacaattagttgaaattattaaatctgtgagacaatcacgcgtagaagtcaatacaccactttctaaatcaatccctattctcattcaagctaaaaatgaagaaattgaaacaatcttagaaaaaaatgctgattatattcacagattttgtaatccaagcgaattaaccattgatacaaatgtagatattcctgaaaaagcgatgacagcggtagtagttgctggtaaagtaattttaccgttagagggacttattgatatggataaagaaattgaacgcttagagaaagagttagacaaacttcaaaaagagttagaccgtgttgataaaaaattatcaaatgagaattttgttaataaagcacctgaaaagattataaatgaagagcgcgaaaaacaacaaaaatatcaagaaaaatataatggtgttaaaaacagaattgaacaattaaaagcataggagaattgtcaatgaattacctagatagcttatattggatacatgagcgcactaagtttggtattaaacctggtgttaaaagaatggaatggatgcttaaccacttaaataatcctcaattaaatattcgcggtattcatgtgggtggaacaaatggtaaaggttctacagtagcttatttaagagctgcattagttgagaatggatatgaagttggaacatttacttctccttttattgaaacgtttaatgaacgaattagtttaaatggttatccgatctcaaatgacgaaatagttgaattagtaaagcgagttaaaccagtaagtgaagcgttagaacaagaaaccgaactcggttctgcaacagaatttgaaattataacaacaatgatgtttttatattttggagatatacatcctgtagatttcgttattgtagaagcgggactaggaattaaaaatgactcaactaatgtgtttactcctattctttcaattttgacaagtataggattagatcatactgatattttaggaagtacgtatttagatatcgcaaaagataaaggtgctatcataaaacctaatgtacccgtcatctatgcagtaaaaaatgaggaagctttaaaatacattagagatttagcggaaaatcagaatgcaaagccaattgaactagatagagaaattattattgtatctgaagatgatgaatttacttatagatataaagattatgagttagaaacaatcatcttagatatgataggtgatcatcaaaaagaaaatgcttcattagctattacagctttaatagagttgaacgaagaaaatattattgaattagattttaataaaatgattgatgctattgaaagtgtttgttggacaggacgtattgagcaagttaaagaaaagcctcttattattattgacggagcacataataatgaaagtgttgaagcattagtttcaacaatcaaaaattattatgatcttgagaaaatggatgttttattttcagccattaaaggtaaacctgtaaacgaaatgttaagtaaattacaaaatttagctggtgccttttattttactgaatttgattttcataaagccttatctaaacaagaattacttgagagtatagatgctgataacatcgaatatattgatgattatgtagattttataaatcattatgatggtgagggcttattgattacaggtagtttatattttataagtgaagtaaaatcgaaagttgaatttaattcataatatatagtatgttaaatgtctaaatatagctatgaagaaagttacaaattaaacttcttcatagcttttttattagttatataattgatagattaagagtggactgattatttttaataaaagttttattcattttattgaatttaaaatgctttaaagaagatatatttatttattgaaatgaatttaatctaatcctcgttattccatttacttagaccatattttagttataatgaatgatatgaggtgataagtataatagtattattagcatttacgtgtagtgtaatatttagttttttatatcaattttcaagtatagagaaagtgaatcttcaatatttcaagcgacgatcccaatgtgattattgtcatacatcattaaagtggtttgatactataccattattaagtttcatattcttaaaaggacgctcgagatgttgttcaaatcctttaaagcgttcctatattataggtgaaatattatcgtttcttattgtcccatatttaatatttatcgatatacatataaattattctctctttatattaacttgtttaatgttgataacgatgtctctaaccgatattcaaacattaacaatcaacagtaacttaatcctcatttttttcattgtcggtatatatatttcttcattacatttgatttcatttatatttattttctttctattacatacattttttctgttaaattctaaaagtatagggtacggtgatattttattacttagtatactttctatattttatacttatgaatttatgcttcatctaatattattaacttgtgcaattggtcttatgttttatatcatcatgtttcgttttaagatacgtaaaatcccacttattccttttatttcaatctcatatattttattaattaatttttccaacaatattatgtaactaataaagaaaaggtgatgtttttgaaaattaaagatatggccaaaagtgagcttcctaaagagagactcattcaatatggtgaaaaaagtttgtctaacagtgaattattagcaattttaattaacactggacgacgaggggtttcaagtattgatattgcgaatgaaatgattaataaagtaaataatttaaaagaattaaaattactttcaatacatgatttgttaaaaataaaaggtataggattgcataaagcagtgacattaaaagccgctttcgaattgggagaaagaataaataaacgtaattcgattgaaaaagtaaagattaaatctcctaaagatgtcgcagatatgatgatgtctaaaatgaaagatttaactcaagagcatttagttgctttatttttaaatactaaaaatatagtgattaaagaagaaactatatttataggaacattaaactcttcagtgatacacccgagagaagtctttaatgctgccattagagcttcatgtaatgcaataattgtgattcataatcatccatctggagatgtgacgccttcaaaagaagatattgctactaccattagacttaaagaatgtggacaaattcttggcattgaattacttgaccatattattatcggtgatcaaaaatttactagtttagtagaggagggatatttcgtataaaaggttaaaaagtatttatagtctcattgttaaaattttagtataataaaccttaattatatatttagaggtgtacgatgactttatttttaatcataggggtattaatacctattatttacataatgagattgaatattaaacaagaaacaattcgtttaaaagaaacacttaatactgtattattatcgattgttggtattacaactttttcttttattggagtattcgttaaccaaacgcatactcaattatatattttactcattagtgatatagtaactggaacgatatttgggttactattagcaacaatatataaaatttatgaatacttgtctcaaagcaatcgtaaataaagctagttaacttttcatacaatacaatcataaacgaattaataaagggatagattgtatcaattacattgaaaagtaactagctttttcattatcttatataagctgaaagcacattaaaattttctaaaatccaaagaacaccttgataggctaaatacagtccgagaataataaaagcagcagagattaaaaatcttaaaagtgcaaatcctactttaaaaagtataactgcaagcaagataagtaaaataattgtaagaatgttcatttctcacactcctctaaatttattttacgagtgatattaattattataatatattttaagaaaatgttaatcagtctaaagaatttacttaatttacttctttagaccgatggatgaaatctattttatatttataataatttaggtttaaaattggagggatttaattgcgaatggtatttagtatttttaaaaatatagtagcagttattgcaatccttagtattgtttattttgcattaaaatatgccccatttttaagagaacaggactggaatcctatgaatcaacctcttagtaaccaattcgagcttctaccaagtaatcaaacatcaacaccagtgcccactaatggaaaaagttatactatagaagaaaacaatttacttcagaatattcctgctagtcaaacgaaaaatgtatttaaatttatagataaaaaagaatttatggaagtttcaggtatagttaggatgggatataatgaaaattacattgtagggcaaagagataatgaatttatcatctataaattcggaagtgatacgattaaagtctttagtacggaaattgaaatggaacaggaattaaatcgtctaggacaatcaattactttaaaacctcagaatgagtattaaaaaatataatttgaaaaaaataaataaatgcgttaatgtctagaatagatacaataatcttttgaaggttggtgtaatgtatgtctgaacaatctaaagaaaaacaagcaaatgaacaagcaaaagcacaaaatttattttcgaaatggagaaaagatgaaacgctctatgaagaagataaaaaagataattcgaataaaaaatcgtaaaattaaataagatgacatttgataggagcaagtactagaattcaatgaagattctaacttgttccttttttcttctttgaagataatatttaatattattctttatttcaatcctagagtaatataaaatagaatataatagtttaaaataaatagtagaggtgttatgagtgttaaatttttttaaaaataacaagttaattgttgttttttgtgcaataattatttttattgcattgattggtttgtccattcgttcacaaactcaatcacctcctgagcaatatgtgggggactcagtgtcatttggtcagagagtaattagttacccggtaaactttgtgactggagctataggtaacttcttaaaatctaacaaatcaaatcataatgaagttaatcaattaaaagcaaaaaacgaagcattagaagctgaaaataaaaacttaaaaaaagaacttgatatgactgatgcttcaaaatacgatgcaatttcaggtgccatcatagcacgtaatccagatcaatggatgaatacagtgattattgataaaggtaaaaaagctggtgtaagcaataatatggcagtgtttactagtgatggtttaattggaagagtaactagagtgaatcaattttcttctcaagttgatttactttctacgagtacaagagctggaaaactatcagtcaatattcaacatcattctaaaaatgtttttggattaattgatcactatgataataaaactcaggaattaattattagtaatatcaataataaggataaaatttcaaaaggtgacaaagtagtaacaagtagattagccgaccaattgccaagtgatttatacataggagaagtgacgaaggtagaaaatgatgaatatggtttagcaaaagaagtgagagtgaaaactggagctaatttatcagatattcaacatgtatacatagcgaaaaaaagtaataatacggatttcaatgaaagagagacccgataatgaaagcgttcgtttatataatgattggtatcatcgttttttatcttgatacacttattagtttagttattccttttcatataggaaacctaacatttatcttagttcctcatttaactttaatgtatttattacttttatcaatttatagaccatttatggtcacattattactaagcatttttttaggtattataactgatatctactttggcagtgtatatggtttatatttgtttggttatatattcttaataacaatatttaataaattcttgaagattttttaccgagactatattatggtatattggttcagtatcattggtgtaatgattcttgaaatatttgtagcaattatatattctgtcattagctatgtagaatttgatttactaaattttatattactacgtattatcccaacacttatattaaatattattttattaattatttttatgcctatattctttaaattttttaaaaagccaatataatagattgacattgaatataagtaatggtaagatgcagtagttgagtagttttatagctacatacaaccgctcaaatacaggtttaagcgttaaaatgtttttattttatcacctgtatatggcgtgacttataattataggaggtgcaaagtatgtttgctattatcgaaacaggcggtaaacaaattaaagtagaagaaggtcaagagatcttcgttgaaaaattagatgttaatgaaggtgattcattcacatttgataaagtattatttgtaggtggagattcagttaaagttggtgctccaactgttgaaggagctacagtaactgctactgtgcacaaacaaggtcgcggtaaaaaaattactgttttcacttacaaacgtcgtaaagattcaaaacgtaaaaaaggtcatcgtcaaccttatactaaattaacaattgataaaatcaacgcttaattatgattactgttgatatttcaattaatgatgaaggtaaagtaacagacgtcattatggatggccatgctaatcatggtgattatggctatgatattgtttgtgcaggggcttcagctgttctttttggaagtgtaaatgctattttaagtttaacttctgaaaagccggatatcgattatgatgatgacggtggtcattttcacattagatcagtagacactaacaatgagcaagcacaattaattcttcaagcaatgcttgtgtctttacaaacgattgaagatgaatataatgaaaatatcagattaaattataagtgaggtgtatcccgatgttaaaattaaacttacaattcttcgcatctaaaaaaggggtaagttctacaaaaaacggtcgtgactcagaatcaaaacgtttaggtgctaaacgtgcagacggtcaattcgtaacaggtggctcaattttatatcgtcaacgcggtactaaaatttatgctggtgaaaatgtaggtcgtggtggcgatgatacattattcgctaaaatcgacggcgttgttcgtttcgaacgtaaaggtcgcgacaaaaaacaagtttctgtatatgcagtagctgaataatttttgtctaattaacaccagaagtgaagacttctggtgttttatttttgtttaaaaatgattataatagaatctaacgttttagagttaatgatataatattagcgatgaattaataaaatatataaaaagaggtgagatatatgtttgtcgatcaagtaaaaatatctctaaaagcaggcgatggaggtaatggtattactgcttatcgtagagaaaaatatgtaccatttggtggccctgccggtggtgatggcggtaaaggtgcttcagttatttttgaagttgatgaaggtttaagaacacttttagactttagatttcaacgtcattttaaggctaaaaaaggtgaaaatggtcaaagtagtaatatgcatggtaaaaatgcggaagacctagttttaaaagtgcctcctggtaccattattaaaagtgtagaaacagaagaagttttagcagatttagttgaagaaggtcaacgtgcagtcattgctcgaggaggtcgaggaggtcgaggaaattcacgttttgcaacccctcgaaatccagctccagactttagtgaaaatggagaacctggagaagagctagatgttaccttagaattaaagctacttgctgatgtgggactcgttggattcccaagtgtagggaaatcaacattgttgtctattgtatctaaggcaaaacctaaaattggtgcttatcattttacaacaattaaaccaaatttaggtgtggtttcaacacctgatcatagaagttttgtaatggcagatttaccaggtttaattgaaggagcttcagaaggagttggtttaggtcatcaatttttacgtcatgttgagagaacaaaagttattgttcatatgatagatatgagtggttctgaaggaagagatccacttgaagattatcaaatcatcaataatgaactgataaattataaacaaagattagaagatagacctcaaattatagtggcaaataaaatggatataccggaagcaaaagataacctagaattatttaaaaaagaaattgatgaagaggtaactattgttccagtttctacaattacaagagataatattgatcaattactatatacaattgctgataaattagaagaagtaaaagatattgattttagtgtagaagaagatgaagatgcaggtgttaatcgcgtattatataaacatacgccatctcaagataaatttacgattacaagagatgatgatggtgcctatgtagtaagcggtaatgcaatcgaacgcatgtttaaaatgacagactttaatagtgatccagcagtaagacgctttgcacgtcaaatgcgctctatgggtattgatgatgcattaagagaacgtggatgtagtaatggtgatattgttagaatacttgggggagaatttgaattcgtcgaataggagggctttttagtggacagcaaagattataaaaagttttatttaatacgtgaagacgttttaccagaatcagtggttaaaacgcttaaaattaaagacgctttaaaaaatgattccacactgtccatttatgaagcagttaagcagtttaatctatcaagaagtgctttttataaatatagagatactatttttcctgtagatgacaagatttttgaacaccgtgaattcaccttgattctctatgttaatgatatagtaggaatgcttgctcaagtactacaaattatttcaaaactagcgttatccgttttaactattcatcaaagtgttccaatggaagaaaaagcaacgattacactctctttgagtgcaaaagatcaatcattatcaatagaaaaggtcatgggcactttgagaaatattcaacatgtttataaagttgaattaattagtatgagtatgtaaggaaggtatttatgtacgcttatataaaaggacatttatctcaattgtttccaacacatattgttgtagaaacgtctagtggtatcggttatgaaattcaaactccaaattcatatcgatttcaaaaatatttaaatcaagaatgtaaagtctttacttcacttattgtaagagaagacgcacaattattatatggttttattagcgaagaagaaaaagagatgttcttaagcttaataaaagttacaggtataggccctaaatcagctttagctattctagccacaagtacacctaacgaagttaaacgtgcaattgaaaatgaaaatgatacttatctaactaaatttcctggtataggtaaaaagactgcacgacaaattgtattagatttaaaaggtaaagttaagattacagaagagactagtgagaccttgttacaagttgagggacaagttgaagaaaatgacaatataattaaggaagcattattagcgcttgcagctttaggatactctaagagagagctttctaaagttgaaaaagtacttaataaaacatccattcactctgttgatgaagcagttaagattggtttaaaaacgcttgtatcttaatattatgaacgataactggggggataaatatggatgatagaatggtagatcaatcattacacaatgaagaatcttcttttgaattctcactcagaccaactaaattaaaacaatatattgggcaatcatcaataaagaacaatttagaaatttttataaaagcggctaaactaagggatgagccattagatcatgtattactttttggccctccaggattaggtaaaacgacactttcaaatattattgctaatgaaatggaagtcaatataagaactgtatctggtccatcattagagcgacctggagatttagcggcaattttatctgggttacaacctggcgatgttttatttattgatgaaattcatcgcttaagtagtgtagtagaagaagttttatactctgctatggaggattttttcttagatattattatcggtaaaggtgatgaagcacgtagtatacgtattgatttaccaccttttactctagtaggtgcgacaacacgtgctggaagtttaacaggccctttaagagatcgatttggtgtccatttaagattagagtactattcggaatcagatttaaaagaaatcattattcgaactgctgaagtattaggtacaaaaattgatgataaaagtgcagttgagcttgctaagcgttcaagaggaacacctcgtgttgcaaatcgactactaaaaagagtaagagattttcaacaagtaaatgaagatgaacaaatttatatcgaaacaacaaagcaagctttaaacttattacaagtggatgatgaaggcttagattacattgatcataaaatgatgaattgtattattaatcaatataatggaggccctgtgggactggatacgatagcagtgtcaattggagaagaacgtattacaatcgaagatgtctatgaaccctttttaatacaaaaaggatttatagaacgaacaccaagaggtagaaaagcaacaccatttgcctatgaacatttcaaaaaaactaaagaatgagggaataatatgaacgttgaggagtttgattatcatttacctgaatcattgattgctcagacacctttaaaaaatagagatcaaagtagattacttgtgctaggtagaaagaccggaaatattgcacataaacactttacagatattatggattattttgaaactggagatacattagtgttaaatgacacacgtgttatgccagcgcgtttattcggttttaaagaagaaacaggtgcaaaggtagaaatgttaatgcttactaggatagaggacaatgactgggaagtgttattaaaaccagcaaaacgtattaaagtaggtaatactttatcatttggtaacggcaaaatcattgctgaatgtataaaagaattagaacaaggtgggcgtattatgcgtctacattttgaaggtattttagaagaacgcttagatgagttaggtgaaatgcctttaccaccttatattaaagaacgtttagacgatccggatagatatcaaactgtatatgctaaagaaaatggttccgctgcagcgcctactgcagggttacattttacagatgagcttttacagaaaataaaagataaaggtgtcaatattgcatttattacactacacgttggcctaggtacctttagaccagtaagtgtggaggatattaatgatcatgaaatgcatagtgaatactatcaaatgactaaagaaacggcagatattctgaataaaactaaagaaaatgggcatagaattatttctgtaggtacaacgtctactagaacgttagaaaccattcgtcgtgatcatgaacaatttgttgccacaagtggttggacagatatatttatttatccaggttttgaatataaagcaattgatgggttaattactaattttcatttgcccaaatcaacattagtgatgttagtctctgcttttagtagtcgagaatatattttgaatgcttataaagaagcggtaaaacttaaatatagattctttagttttggagatgcaatgttaataatttaatgaatgagaggtacagattatgccagcagtaacttatgagcacattaaaacttgtaagcaatcaggtgcacgtttagggattattcatacaccccacggctcatttgagacacccatgtttatgccagtaggtacgaaagcaacagttaaaacaatgagtccagaagagttaagacaaattgaagctaaaattatattaggaaatacatatcatttgtggttacaacctggaaatgatattatcaaacaagctgggggcttacataagttcatgaattgggatggccctattcttacagattctggtggtttccaagtatttagcttgagtaatcttagaaaaatatcagaagagggtgtcgaatttagacatcatacaaatggctctaagttgtttttaagtccagaaaaatcaatgcaaattcaaaatgacttaggttcagatattatgatggcatttgatgagtgtccacctatgcctgccgaatataaatatgtaaaagattcaattgaacgtacaacgagatgggctaaacgatgtcttgaagcacatcaacgtccagaagaccaagcattatttggtattatacaaggtggagagtacaaagacttaagagaacaaagtgctaaagaacttgtatcattggattttcctggatatgctattggtggtttatctgtaggtgaaccaaaaccagtgatgtacgatatggttgaacatacggttcaatttatgccagaagataaaccaagatacttaatgggagtaggatcacctgatgccttaatagaatgtagcattcgcggcatggatatgtttgattgtgtgttgccaacacgcatagctagaaatggaacatgtatgacatctcaaggacgattggttataaaaaatgctaaatatgcagatgattttagtcctatagatgagaattgtgattgctatacttgtaagaattatacacgtgcatatattagacacctaattaaagcagaggaaacgtttggtatccgtcttactactattcataatttacattttctgctaaaattaatggaagatattagacaggccattcgagaagatcgtttattagattttaaagaagaatttttcgaacaatatgggctaaatgtagagaaccctaaaaacttttaataaggagaacaacataatgaatgtttcagcattaatcttgcctataattttaattatagtattttatttctttttaattagaccgcaacaaaaacgtgcgaaagaacatcgtgaaatgattagtcgtatcgaagcaggtcaaaaaattacaactattggtggaatcaaaggaacagttaaagctgtggatgaaacagcagttgtaatcacagtaaatggtcatggtactgaaatgacatttgaaaaacctgcgattaaacaagttgatccatcataaattataataaaaagacattccacgacagtttgttgtcatggaatgtctttttattaactatttatcttgattacactaataaagaggttatgttaagatagataagtcttgtcacatagatgtaatctttaattcacttgcacatggtttattaaaagattattctaattacataagtaaataatgaggtgttcatgtgaaaaaaacaagtagaataattgcattcatactcattgtagcgctactgattgtaggtatgggctttacatataagaatgtagttaagaatgtaaatctaggtttggatttacaaggtggtttcgaagtattatatcaagttaaaccacttagcggtgatggtaaaatcgatgataaggctttacaatctactgctcaaactttagaaaatcgtgttaatgtattaggtgtatctgagcctcatattcaagttgaagaccctgatagaattagggtacaactcgcaggggtaaaaaatcctgatgaagctcgaaaaattttgtcctcacaagcaaatctgactatacgtgatgctgatgaccacgttaaattaacaggtaaagatattgtacaaggttctgcaaaacaagaatttaaacaaggtacaaacgaacctgcagtcacttttaaattaaaagaccgtgcgaaattcaaaaaagttacagaagaaatttctaaaaaacaagaaaatatgatggtagtgtggttagactataaaaaaggtgatagctatcataaagagttggaaaaacctgaagataaacggaaatacgtttcagccgcttcagtagatcaacccattaattcagacagtgtagaaatttcaggtggcttccagggtcaacaaggcgtagaacgtgctaagcaaattgcagaattattaaatgcaggttcattaccagttgatttaaaagaaatttattctaattctgtaggtgcacaatttggtcaagatgcattagataaaacaatctttgcatcaatggttggtgttgcaattatctatttatttatggtaggtttttacagattaccaggtattgtagcagtgatagctttaacagtatatgtttatttaacattagtagcatttaactttatttcaggtgtacttacattaccaggtttagctgcattagtattaggtgttggtatggctgtagatgcaaacatcatcatgtatgaacggattaaagatgaacttagagtaggacgaacgcttaaacaggcttattctaaagcaaataaaagttctttcttaacgatttttgattcaaacttaacaacggttatagcagcagcagtattattcttctttggtcaaagttcagttaaaggatttgctacgatgttattattaggtattttaatgatattcatcacagctgtcttcttatcaagaggactattatcacttttagtttcttctaattactttaagaagaaatattggatgtttggtgtaaataaaaataatcgccatgatatcaatgaaggtgtagatgttcatgacttaaaaacagcttttgaaaaatggaattttgttaaattagcaaaaccattaattggagtaagtattttaattttagtaattggtataattattctaagtatatttaaacttaacttaggtattgatttctcatctggtacaagagtagatcttgattctgatacgaagttatctcaaacgaaagttgaacgtacgattaaagatgttggtttgacacctgatcaaattcaaattaatggtaatgacaataaacaagcaacagttcaatttaaaaatgatttatctaaagatgaaactttgaaacttaataaagttattaatgatcaatatggtcataaaccgacagtgaacacagtctctccaatgattggtcaagagttagctaaaaatgcaatgaaagcattaatttatgcagctattggtattattatctatgtttcattaagattcgaatggagaatggggctttctgctgtcttagcattacttcatgacgtatttattatcgttgctttattcagtttattaagacttgaagtagatattacatttatcgctgcaatcttaacgattgtaggttactcaataaatgatacaattgttactttcgaccgtgtaagagaaaatcttcataaaattaaagttataacagaacctcatcaaatcgatgatattgttaaccaatctattagacaaacgatgactcgttctgttaatacagttcttacagtcgttgtagtagttatcgccatactaatctttggtgcatcaagtctgtttaacttctcattagcattacttattggattattatctggtgtattctcttctatctttattgcagttccactatggggcatcatgaagaaacatcagttgaaaaaatctgaaaacggtaagcttgtagtttataaagagaaaaaatcaaatgatgaaaaaatcttagtataattaaatatatgatataaaattagtggaagaaacaaaagaattctaattgaattcagtgtttcttcctctttttatttattctttttttaggtataattgcttgtggaaaaaggaaggataactttatgattcaatctaaatataaatggctttatgaagcacctaaacaaaatatatcgtctgagattattaaggaatttaatttatctcctattgtaagaaagattttagaaagtaaatcgattacacagtacgatgagataaatacattaattaatggtacaaataaaaagcatgattcatggctaatgagtgatatgcaaaaagctgttgatcgaattaatttagcgattgataaaaatgaaagaatattagtatatggagactatgatgccgatggcgtaacatctacaacgatattagttcaaacactgcagaaattgggcgctgaagtcggttggtatattcctaatcgatttagcgaaggttatggcccaaataaatacgcctttcaaaatgcttacgatgaaggcgtatcacttattattacagttgacaatggaatacaaggtcatgaagaaattgaaatggtacaagcattaggagtcgatgtaattgttacagaccatcatgaaataggccgtacattaccaaaagcatatgccattattcatcctatgcatccagaatttgagtatccatttaaatatttatgtggagccggtgtcgcatacaaattatcgcaatgtttaatagatcatcctccagaatatttcatagttcttgcaactattgggacgattgcagatttagtgtcactgactgatgaaaacagaacgattgttcaagaaggtcttaaatatttaaatcaatcctgtccatttcaaattcaatcattattaaatcaagcaggatttaatgatgagatagatgaagaaacaattggtttcattattggacctcgtttaaatgcggtaggtagattagaagatgcgtcattagcagcggaattactgatggcagaagattctgaagaggcgaattttttagctgaacaagtagaggcatttaacattgaacgtaaagatattgtagctcaaataacagaagaagccctattgatggctaatgaaaaagttgaaaatggcgacaaatttttacttttagctaaagaaggatggcatgagggagtattaggtattgtggcttcaaaaattgtagaaacttatgctttacccactcttattttaaatatagatttagaacaacatcatgcaaaaggttcagctagaagtattgaacaagtgtccatgttcgaaattttaagtgcacatcaagatttgatatctaaatttggtggtcatcatatggcagctggaatgacgatggagattgataatattgatgcattatcaaaaggactaaatgagtggatggttcagctttctaaacatacttctttagaaccaacaaaacatattacgactaaactttcagaagatgacattactgtatcaaatattcatgatattaaaatactgaaaccgtttggtactgattttgaaaaacctttatttgaattggatgatacagaagttaatgatgttaaagcgattggaaaagataaaaatcatttaaaattagtaactggtcaagctaagttacaacatttattttggaaaaatggtggtttaattacacaaatagaattaggccaacccgtcaatatcataggacatttacaaataaatgagtggaatggcaatcagacacctcaaatgatgatacaagatttagcgactcaaaatgagcaaatattagattatagaagtaaacgtaaacaacttaacattgatacgtcatctaaaaatgttgcttttgtcattcattctaaaaaagagaagctaggggagaattatttccactacggtgaaacaattgattcatcatataatacgattgtatttcgtgatttaccaactgatttagatagtgttaaacaatctctaaaacatttagaatactcacaactctatttagtattacaccatcaacattcaatttatttcgaggggttaccgagtagtcatctatttaaacaaagttataaggcactattcattaggaaagaaatgaatttagaaaaagaaggtttacaattatgtcaatacttaaatattaagccaaatactttaaagtttattttaaaagtatttcttgacctaagttttatttacgaagaaaatggtataattaaaataaatgataatccaagtaaacaatctattgagtcgagtcaagtttataaatcgagacagtcaagaattgaagttgaaaaattaatgctttatgatgacttttcacatcttaagaattggattaaagctcaaaaagcgtaacgcataggaggaaatttttaaatggatttaaagcaatacgtatctgaagtacaaggctggcctaaaccaggtgttagtttcaaagatattacaactattatggataatggtgaagcatacggttatgcaactgatcaaattgtaaagtatgcaaaagatcgtaacgttgatattgttgtaggccctgaagcaagaggatttattattggctgtccagttgcgtactcaatgggaattggatttgcacctgtaagaaaagaaggaaaattaccacgtgaagttattcgctatgaatacgacttagaatatgggacaaatgttttaacaatgcataaagatgcaattaaaccaggacaacgtgttttaatcactgatgatttattagcgacaggtggaacaattgaagcggctattaaattagtagaaaaattaggtggtattgttgttggaatagcttttattattgaattaaaatatttaaatggtatggaaaaaattaaagactatgatgtcatgagtttaatttcttacgatgaatagtcattaatttagtaattagattaatatatactttaaagcgagtgtaggaattcagattgaatactatctcgcttttttatttatcgttgtatcatcattaatctaatcacatttatttatttaaaaacttgtagtattatataactattatttaaaccaaagttaatcttttagagattttaatacttttgttaaaattacattaatactcacgcatctttaattaataggagtggtactcggattaattaagtaatgaaaagaaatttcttgattttcaatgattcggttatcggtagagtatttgaaatattaaaaagtcggggtgtcatatattgaataacgagtatccatatagtgctgatgaagtactaaataaagctaaatcctatttatcagcagatgattatcaatatgttttaaaaagttatcatattgcttatgaagcacatcaaggacagtttcgaaaaaatgggctaccatatattatgcatccaattcaagtagcaggtatattaacagaaatgcgcttagatggaccaacaattgtagctggctttttacacgatgtgatagaggatacaccatatacatttgaagacgtaaagaatatgtttaatgaagaaattgcacgaattgtagatggtgtaacgaagttaaaaaaagttaaataccgttctaaagaggaacaacaagcggaaaatcatagaaagttatttattgcgatagctaaggatgttcgtgtcatattagttaaattagctgaccgcttacataatatgagaacgttaaaagcaatggctagagaaaaacaaattcgtatttccaaagaaacattagaaatctatgcacctttagcgcatcgtctaggtattaataccattaaatgggaattggaagatattgcgttacgttatattgatagtgttcagtattttagaattgttaatttaatgaagaaaaaacgcagtgaacgtgaagcatatattcaaaatgctatggataaaattcaaactgaaatgaataaaatgaatatccaaggtgaaataagcggtcgccctaaacatatttacagtatttatcgtaagatggtaaaacaaaaaaaacaatttgatcaaatatttgatttattagctatacgagtgattgtgaattcaattaatgattgttatgctattttaggcctagttcatacattatggaaaccgatgccaggtcgttttaaagattatatcgctatgccaaagcaaaatatgtatcaatcattacacactactgttgttggacctaatggtgatcctttagaaattcaaattcgaacatttgaaatgcacgaaattgctgagcatggggtggcagcgcattgggcatataaagaaggtaaaacaataaattctaaaacacaagatttccaaaataaacttaactggttaaaagagcttgcagaaactgaccatacatcttcagatgcacaagaatttatggaatcacttaaatatgatttacaaagtgataaagtatatgcatttacgccagcaagtgatgtgattgaattaccttatggcgcagtccctattgattttgcttatgccattcatagcgaagttggtaataaaatgattggcgcaaaagttaatggtaaaattgtgcctatagattatatacttaagacaggcgatattatagaaattcgcacaagtaaacattcatatggtccaagtagagattggttgaaaattgttaaatcatctggagcaaaaagtaaaataaaaagtttctttaaaaagcaagatcgttcttctaatatagaaaaaggtaaatttatggtagaagcggaaattaaagaacaaggttatcgagttgatgagattctaacagaaaaaaatattgaagtcgttaacgaaaaatatcattttgccaatgatgatgatttatatgctgcagtaggttttggtggagttactgcattacaagtagtgaataaattaacagaaagacagcgtatacaagataaacaaaaagcattaaatgaagcacaagaagtcattaaaacatcaccaattaaagaagatatcattactgatagcggggtttatgtcgaaggattagaaaatgttttaatcaaactatctaaatgttgtaatccaattcctggtgatgatattgttggatacatcactaaaggacatggtattaaagttcatagatcagattgcccaaatattaaaaatgaaaacgagagattaattaatgtcgaatgggttaaatcaaaagattcaacacaacgttatcaagtagatttagaagtcaatgcatatgatcgaaatgggttactcaatgaagtgattcaagccgtaaattcaaccgtaggaagtattattaaaatgaatgcacgatctgatattgacaagaatgcaatcattacaattagcgttatggttaaaaatgtaaatgatgtatttcgtgtagttgaaaaacttaaacaattgagtgatatttatacagtttctagagtatggaattaaaagaggtgctaagatatgaaaatagttgtacaaagagtaaaacgagcatctgtcactaataaatctattcaaaaccaaattgaaaaaggttattgtttattagtaggtgttgggaaaaattcgacggaagctgatatagaagtattagcgaagaaaattgttaacgcacgtttgtttgaagatgataacgggaaattaaatttaaatattcaacaaattaatggtgcgattttatctatttctcaatttacactttatgcagaagttaaaaaaggtaatagaccaggtttctcacaatccatgcgacctgaagatgccaaaatattatacgataagtttaactctgaacttcaaaagtatgatattgatattcaaactggtgaatttgggacagatatggaagtagaaattattaatgatggtcccgtaacgattatatatgaaagtcaggatggcaaagtaatatgaataaattagatacatggttaactaaacatgatctaaaaaatatgttgacgttagtagtagtgttattatttattctttttataatattattatttatgtttatgaatcataatgatcaagatagtaatagactaacaataacggaagatgcagaaataagaacaggtcctaatgcaggctatccggtgatatataaagttgaaaaaggagatagttttaaaaaattaaagactacaggaaaatggattgaagtccaaaatgctaaaggagataaaaaagggtgggttgctggttggcatacgagtttgaatattaaagctgatgtcaataaacaggaaaatccttttaagaataaaactgtggtacttgatcctggtcatggaggtagtgatcagggagcctcaagctccacggctcttaaatctctcgaaaaaaactatactttgaaaacagcacttgaattaaaacgggcattagaaaaagcaggagcgcatgttaaattgacgagaacagatgatagttatgtaagcttagataatagaaaagcgacaggcgatgtatttataagtattcataatgactcattagatagtcataatgctaatggcgctactgtatattggtatcaaaatagtcaagaaacattagcagaaatattaaatgcgaatattcaaaaaaagtcattactttctaatcgtggtgttcgtcaacaaaattatcaagttttaagacaaacgaataaaccagctgtgttacttgaattaggctatataagtaatcctactgatgaaaaaatgattagaaatcaattacatagacaggtggtagaagaagcagtcgtagatggattaaagcaatattttgcttcataatacttgcaaacttttcctaaaatcggtatcataatcagtgaactttataaataataccgtttgtattcttgaaaagactaatgaaatagtggacaatcataatgattgtgaagagaagtaatcctaggctgaaagattatactagtacattggtatctttgaacacaagaaaaggtgctttgataaaataaagccggtttgcgtacgttacacgtgatgagtggagaatatttttattctcaattagggtggcaacacggcatatcgtcccttatatagcatgaagctatataagggacttttttattaaagaattttaatagttaacaacaatttagaaggagtgattgtatgattaagattcctagaggaacgcaagatattttacctcaagagtctgcaaaatggcgatatattgaaaataaattagatgaattaatgaaattatacaattataaagagatacgtaccccaatatttgaaagtactgacttatttgcaagaggtgtaggagattctactgatgtcgttcaaaaagagatgtatacgtttaaagacaaaggcgatagaagtatcacattaagacctgaaggaactgcagcagtagtgcgatcatatattgaaaataaaatgcagggtgaacctaatcaacctattaagctttactataatggaccaatgtttagatacgaacgaaaacaaaaaggacgttatcgacaatttaatcaatttggtgtagaagcaataggagcagaaaatccaagtattgatgcagaagtattagcaatggtaatgcatatatatgaatcatttggtttaaaacatctaaaactagtgattaatagtataggagaccaagcatctcgtaaagaatataatgaagcattaattaagcattttgaacctgtcattgatacattttgtaatgattgtcaatcacgtttgcatacaaacccaatgagaatcttagattgtaagattgatagagacaaagaagccgttaaacatgctccaagaattacagattacttaaatgatgaatcaaaggcttattatgaagcggttaaacatcatttagatcaactagatatcaattatgttgaagatcctaatttagtgcgtggacttgattattatactcatacagcatttgaactcatgatggataatccaaattatgacggtgctattactacgctatgtgggggaggtcgttataatggacttcttgagttattagatggtcctaagcaaacaggaataggttttgcccttagtattgaacgattacttcttgcacttgaagaagaagacatagaattgaatgtggatgaagatttcgatttatttgtcgtaacgatgggtaaaaaagctgaacaatatagtgtgaaacttttaaatgatttaagaaaacatggcgtgaaagctgataaagattacttaaatcgaaaaattaagggacaaatgaagcaagctgatcgtttaaatgctagatatacgattgtaataggtgaccaagagctagacaataataaaattgatgttaaagaaatgtctacgggtgaaacaaaaacaattcaattagatgaagtagttagtttctttaataaagaaaaggagaataaataatgggtaaaagaacaacatactgtggtttagtaactgaagaattattaggtcagaaagtaacactaaaaggttgggttcacaaccgacgtgatttaggtggccttatttttgttgatttacgtgatagagaaggaattgtacaaattgtattcaatccagatttttcaaaagaagctctatctattgctgaaactgtaagatcagaatatgtggtcgaagttgaaggttcagtcactaaaagagacccagaaacagttaatccaaaaataaaaacgggtcaagtagaagttcaagtatctaatattcatataattaataaatcagcgacacctccattttcaattaatgaagaaaatcaaagtgttgatgaaaatattcgtcttaaatatcgctatttagatttaagacgaccagaattagctcaaacatttaaaatgagacatcaaacaactcgatcaattcgtcaatatcttgataataatggtttctttgatattgaaacacccgtattaacaaaatctacaccagaaggtgcgagagactatttagtgccatctcgtgtacatgaaggcgaattttacgctttaccacaatcaccacaattatttaaacaattattaatgattagtggttttgataaatactatcaaattgtaaaatgtttccgtgatgaggatttacgtgctgatcgtcaacctgaatttacacaagtagatatcgaaatgagttttgttgatcaagaagatattattcaaatgggcgaggaaatgctttctaaagttgtaaaagatgtaaaaggtattgatatccaaacaccattccctcgtatgacatatgatgaagcaatgaaacgatatggttctgataaaccagatacacgttttggtatggaattgcaagatgtgtctcaattaggaaaagaaatggatttcaaagtatttaaagatactgtagaacacgatggagaagttaaagcaatcgttgctgaaggtgctgcagataactatacacgtaaagatatggatggattaacagaatttgtaaatatctatggtgctaaaggtctagcttgggtgaaagttgtagatgaaggcttaagtggtccgatagcaagattctttgaagaagagaatgttaacacattaaaagaattaacaggtgctaaacctggagatttagtaatgtttgttgcagataagccaaatgttgtggcacaaagtttaggtgcacttcgaattaaaattgcaaaagagttaaaattaattgatgaatcaaaattaaacttcttatgggtaacagattggcctttattagaatatgatgaagatgctaaacgttatgttgctgcgcatcatccgtttacatcacctaaagatgaagatattgctaaactagactctgaaccagaaaaagttcaagcaaatgcttatgacgtagtattaaatggatacgaattaggcggtggatcaatcagaatatctgacggagaattacaagaaaaaatgtttgaagttttaggatttactaaagaacaagctagagatcaatttggtttcttattagatgcctttaaatacggtgcaccaccacatggaggcattgctttaggtctagatagattagttatgttacttacaaatagaactaatttacgtgataccatcgctttccctaaaactgcttctgcaacttgcttattaacggatgcaccaagtgaagtatcagataaacaattagaagaattatcgttaagaattcgtcattaatcttcatttttaaaatagaataatttagtgctaaattgggacggaaattgaatttctgttccaatttttttataaactaacttaaattttaaataacaataattatattatgtaaacctatgtatttaaagatattttatattttaaaatatcttcatacagtatttaaggatttatttaataatctctttatgataaaatatgtctataagatagtcatctgtgttgttcgtatgtttgctttttatttgggcctaacactttttgattagggagcccaataggttttcttgcagcgcacatgcctcatttggaggacttgcaaaacaagaaacagggcacccacctgtatatagcaggccgaatgatcaagctttttataactacggcaactacggactctatcggtacgtaaggctttaggccttacgtatttttttttgcttttttctgttaatatagtattaatatttgctaagtaaaggagttaattatgaaacatcaattttctagaaatgaattagcctatggacaagaaggactagatttactaaaagacaaaacagtagcggtcttaggggtaggtggagttggttcatttgctgctgaagctttagcaagaactaacattggtcacattattcttattgataaagatgacgtagatatcactaatgtaaaccgtcaaattcatgcattaactactaccataggtcaaagtaaagtaacattaatggaagaacgaattaaactcatcaatccaaattgtaaagttacacctcttcacatgttttatactgaagagacatatgaagatatttttaataattacaatattgattattttatcgatgcaagtgacacgattatatacaaagttcatttaatgaaagaatgtttagatagaggaatcaagttgatttcaagtatgggcgctgcgaataaaatagatccaacacgtttcaaaattgctgatatttcaaaaacatacatggatccaatggcaaaaattattcgtaacaagttgaaaaaacttggaataaaaaaaggtgttcctgttgttttttcagatgagagtccaatagttattcgtgaagatgttaagaaaacagttggagatgcaaatgcaataaatcgaaaaggtcaaatgcctccatcatcgaatgcatttgtaccaagcacagtaggtttaatttgtgcaagttatgtcgtaaatgatattttaaaagatattcctgtacgtagaattaaagataaaggtaacaactaacaaaaaacctatggaagagatgaatgaagtattatcatcttttccataggttttattagtttttatgatttaaattatcatacactattttaaattgttgttcacttttagacgttgtttttggttcataatatattttattttttaaagcgtcaggtaaatattgctgtttaatataaccattctcataatcatgaggatatttataaccgatagatcggcctaagtcttttgctccttgatagtgaccatcacgtagatgattaggtatttgtccaactttgccttttctgatatcacttaatgcactatcaattgcttttatagctgaattagacttaggagatagtgataattcaattactgcttgacttagaggaattcgtgcttcaggcaatccgagtcgttcagctgattgaatagctgctagtgttctttgaccagcacttggagaagctaagccaatatcttcataactaatgacgagtaaacgtcgtacgattgttggaagatcacctgcttcgattaatctcgccaaataatgtaaagcagcattaacgtcacttccacgaatagacttttgaaatgcactcatgacatcataatgcatgtcgccatctttatcactgataaaagcacctttttgtaaacaatctttagcatcttctaaagtaacatgacgttgattattggaaactttagcacttaatactgctaattccaaagcatttaaagcgcttcttacatcaccatgactttgagtagagaaatattttagtgcatctttatcaatttttggttgatacgattttaaaccattttgatcatcatttaatgctctagttaatgcttgatatacatccttttcatcaagtggatataattcaaaaatttgtacacgtgagcgaatcgctggattaattgcatgataagggttagaagttgtagcaccaattaaaatgattttaccattttctaaatgtggtaataaaaaatcctgttttgctttatctaagcggtgaatctcatctaataataaaatgacttgtcctgacattttagcttcttcaactatcatttgcatatctttttttgtattcgttactgcatttaattgtctaaatttatattcagtactgccagcaatggctttagcaatactagtttttccaattccaggaggtccataaaaaatcatagaagataattttttagtttctaccatacgtcttataatgcctcttggaccaactagatgttgttgtgaaataatttcatttatatttgtaggcctcattcttgaagctaaaggttctgtattcaattttttcacacctttctattactatattaactgaaaaaatgatagaatgggactatattattcgaattaagtgaggtaaaactatgaaaatatcaacgaaagggagatatgggttaactttaatgatttccctagcaaaaagagaggggcaagggtgtgtatcattaaaaacaattgctgaagaaaatcatttaagtgatttatatttagaacaactcgtgggtcctttaagaaatgctggattaattcgaagtattcgtggcgctaagggtggatatcaattaagagtcccatctgaagaaatttcagctggcgatattattcgcttattagaaggacctattactattgtagaaagtatagattctgaaccaccagcacaaaaagaattatggttgcgaatgagagatgctgttagagaagttttagataatacaacattaaaatatttagctgattttgtagaatcagataacgatttagatggttatatgttttacatttaaaaatttaaattaattatgtttaaaacttttttactgtggtattggattaaagtaagtaaaaattacttattaaaaattaaatgcttaaattcgaaaggagaatttcaatatgggattcatggataaagcaaaagatgcagcagagaaatttgaaaatagcgataacgaacaagtaaataaagtaaaagataaaattaatgaatatactggtggaaataacgacagtaaagatgacaaaaaagacaataaataattaaaattgtgagtgatgattttagtcatcactctttttttatgaaaaatttaaaacctgttgacaatttatttatgttcaacaggttttaatcaatattatttatttaatttttgaattactcgtttaaaacgctcatatgattcaaattgtctatcttggtcataaatatagcttacggccattatttcatcaatatcaccatattcctctaaaaatgcttctaatttagcttttacagtttcttcagaaccaataagagaatcatcaaatctttgttttgccatttcatactctctcggtgttaaaagaccttttaaatcatcagttggtggttgaactggttgcattcttcctcgagcaatactaatgaatacttgtgctaaagaactagctaaatattctgcttctttatcagtttctgtcacgatagcatttaaacatacaatcatatatggtttatctaatgcttcagatggttcaaataagtcgtgataaatttcaattgcttctttcatttgctgtggtgcaaaatgacctgcaaaaacatagggtagaccttttctagctgctaaatgtgcagagtcagttgatgatccgagtatatataacggtacatttttatctaccgcaggataagcccttacataagcttgtttatttcctggaccaaaataagtttgtaattgttctacttcttcagggaaagcatacacaccattatgttgatctcgtctcaatgcacttgctgtcatcatatcagtaccaggtgctctacctaatcctaaatctacacgattgggataaatggtttctaaggtgccaaattgctcagcaacaactaaaggtgcatggtttggaagcatgatgccacctgaaccaactttaatattatgagtatgttcaagtgtatgttgtattaacaatgatgtagctgagcttactaaattaggtgcattatgatgttctgcaatccaataacgctcataatctaattcatctaatttctgagctaaagccaccatatcattaattgcatctttatcagtttgaccttctcgtataggaactaaatttaatgcagaaaattttatatcagacatagactatttctcctttttatctttattatctaatagtttaacaacttaaaacaattacagttattaaattgctcatacttaaaatgattattgaaagaaaaatagttaatatattaattcataaacaagaaggtagaaaattttagaatgaggtgctattataggaacattgataatattgtgaggagtgtacttaataatggaagtatacgcagattatgctgcaactacaccagtcaaaccagaagttatagaagcaatgatggatatgtatcaatcacactacggcaatccatcttctattcactcagtaggtagagatgctagacgctatttagatgaatctagaagaaatgttgctcaattactaggtgctaaaccaagcgaaattatttttactagtggtgctacagaatcaaataatactgctattaaagggttagtctatgctaatgagcatttaggtaatcatattattactacaaaaattgaacatcattctgtattacacgtattcgagcaattagagaaagaaggatatgaagtcacatatttagatgtagatgatacaggtagagttgatttggatcaattggaagaatctttaacagatgatactatcttagtatctattatgtttgtcaataatgaagtgggcacagtagaacctatttacgatatcgaaaacattgtttctaattcaaatgctctattacatgtagatgcagtccaagcaattagccatttagatattaaatttagtgagtttaatattgataccatgagtattactgctcataaatttggcggacctaaaggtgtaggcattttattagtaaaaaacaatacaccaatcgagtattctcaattaggcggcgaacaagaaactaaacgtcgtgctggaacggaaagtgttccacaaatagttggaatgaccaaagctctagaaatagctactaaaaatcgagatcaaaataatattcatttaatgcaattaaaagaactttttttagtaagtttgcaagaacgtgcaattccatttgaagtcaatggttccatggtagaaacgactggccatatacttaatttatatcttccatttatagatgtagaaacaatgttaactttattggatttggcaaatatttatgtttcgtctggttctgcatgtacagctggttcaacaactccgtcacatgtacttgctgctatgtatgaagatgaagatcgtgcaaaacattcagttagatttagttttaatgaaatcacaaccgaacaagatataaagtatattgttgctgaaattcataaaatatatcataaatttaaggaggaatagaacttgtcaaataaagatatacgtgttgtagttggtatgtctggaggtgtagatagttcagtcacagcatatcttttaaaggaacaaggatatgatgtcattggcattttcatgaaaaactgggacgatacagatgaaaatggtgtatgtacagctacagaagattataatgatgttatagcagtatgtaatcaaattggtataccatattatgctgtgaattttgaaaaagaatattgggataaagtattcacatatttcttagatgaatataaaaaaggtcgtactcctaatccagacgtcatgtgtaataaagaaattaaattcaaagcatttttagaacatgcattaaaattaggagccgattatgtggctactggtcattatgcacgaatccatagacatgaagatggtcacgtagaaatgttacgtggggtagataataataaggatcaaacatactttttaaatcaattatctcaagaacaattatctaaagtcatgtttcctattggagacatagaaaaaaaagacgttcgtaaaatcgctgaagaacaagacttagcaacagctaagaaaaaagattctacgggtatttgttttattggggaacgtaattttaaatcattcctttctcaatatttaccggcacaatctggtgagatgagaacactcaatggtaaaaaaatgggcatacacagtggtttaatgtactatactattggccaacgtcatggactaggtattggtggagatggagatccatggtttgttgttggtaaaaatcttgaagataatattttatatgtcgagcaaggcttccatcatgatgcattatatagtgattatttaattgcttctgacgcatcatttgttaatccagttgatttagaaaatggatttgaatgtactgctaaatttagatatcgtcaaaaagacactaaagtatttgttcaaaaagaagatgaacaatctattcgagttactttcgacgaacctgttcgagctattacaccaggccaagcagtggtattctataacggagaagtttgtttaggtggcgctactatagatgatgtatataaaacaacaggtcaacttagctatgttgtttaatgtttagtaaaccgttaactcattgtaaatgagaattagcggtttctttttaattgtaaatttatgttagaaatggagacatggaaatgattgaacaagaaacaatatatcagtggatgaataatggtaattatgaagaagccattaaagcattatttaataatattgaagagaatcctaatattattgaaaattatattaatgctggtatcgttttagctgatgttggtgagattgagaaagcagaaagattttttcaaaaagcaataacattagatgacaaaaatggcgctgtttactataatttagctaatctatattatgaacaatcgcgttttcaagaagcgataaaactttatcaacgagctttaaaatataatatgaatcccgttgatgctaattatatgattggtatgtcttttagccaactagatgcgcaaagagaagcattacccttttttatgactgctgctgaattagatcaaactttggacacagaagttcaatttcaatatggtttaacattatgtcatttagaaatgtttcaagaagccattaagcaattaaattatgttttatctattaattctaatcacgtagatgcattatataatttaggtcttgcaacatatatggaaactgaggatgctgataaagcaattcagtattttgataaagcaattcaaattgatcctaaacatttattaagtcagcatgctaaacaaacatttaaatctctaaaaaatgaggaggaataatatgtcaaaccctacactatttgattactcaatggttaaaggaacagttgataccattctatttcaaaataaagataacttttatactgttttaaaagtagattccattgaaactaatgaatcatttgataatctgcctacagttgtagggttttttcctaatattgttgaaggagatgtctatacgtttaaaggacaaattgttcaacatcctcgttatggtaaacaacttaaagctgaaacatttgaaaaagaattgcctcaaactaaagatgccattataagttatttatctagtgacttatttaaaggtattggtaaaaagactgctcagaatattgtaaatacattaggagaaaatgcaataaatgatattttaactgatccttctgttcttgaaaatgttcctagtttagcaaaaacgaaacaaaaacagattgtagaacagattagtgcaaatcaagagtcagaaaaaataatgattcgcttacatgacttaggttttggtccaaaattatctatggcgatttatcaattctatcaatcagagactttaaaagttttagaaaacaatccataccaattagtttatgatgtaaaaggtattggttttcaaaaagctgatacattagctagaaataatggtattgcttataacgattcagaacgtttaaaagctggattattatatactcttgaagaagaatgtataaaacaggggcatacttatttagatgaaaatgctgtattagaaattacagaagatatgctttcagataagcatttagatgaaacaattgaacaacaacaattaaaacatgtactacaaacactttttgaagaaaagaaaattattttagagaatagtcatgttgcgattccaagtttatactattcagaacttaaaagtgttcaaaatttgtatcgtatcaacacatacaaaaatcactttaaaataatagagcaatcagatttacagatacatattggtgaactagaagatcaaaataatgttaattatgctaaatcacaacaagaagcacttgaaacggcgatgaattcgaaaataatgttactgactggagggccaggaacaggtaagacaactgttattaaagggattgtagaattatatgctgaaattcatggtctatctcttaagtattctgattatcaagaagatgattatccaatcgtattagccgccccaactggaagagcatcaaagcgtttacaagaatcaactggcttagaggcaatgacgattcatcgattaataggatggaatcaagatactcaaccagaagatattcttgagaatgaaattaaagctaagctcattataattgatgaaatgtcaatggttgattcttggttgttccaccaatttttaagtgccgttccactagatgcacaaatcattctagtaggggatgaagatcaattgccatctgtcggtcctggccaagtatttaaggatttaattgagtctaaagcatttccaagagttaatttaactgaagtttatcgccaacaagatggttctagcattattgacttagcgcatcgcatgaaacatcatgagccaatagatattacaaaacgttatcatgatagaagttttattcattgcaatgtagaacaaattccaactgtagtggagaaagtagtatctagcgctgtaaataaaggatatgatatgagtgatattcaagttttagcacctatgtacaaaggaagtgcagggataaaaagacttaatcaagtattacaaaatattttaaatcctaaagaaaaagatacaagagaaataaagtttggcgatataacgtttagaaaaggagacaaagttttacaactagtcaatcgaccaaatgataacatttttaatggtgatattggagtcatagtaggtatattctgggctaaagaaaatgcacttaacaaagatgtactgattatcgattttgaagggaatgaaattacatttactagacaagatttattagaactcacacatgcttattgtacctcaatccataaatcacaagggtcagaatttcctattgtcattatgcctattgtcaaacaatattttagaatgttgcaaagacctattttatatacaggtctgacacgtgcaaaacaatctttagtactattaggcgatccaaaggcatttgacattgccttaaatacgcaaggtcaagaaagacatacacaattaaaaacactaattataaattattttggtatgagtcaggttaatatagatgtagaagagaatgatgaacagataaatatagatgataaagatgataataatgcagttgaacacattactttaagtgaagaaacaatttatcaaattaatccaatgattaatatgggaaatgtttcaccttacgactttgttgaacattgacaatttaaacaaaaatacttaaaataaatttgaattcgcataaagatgagtaaactttttaacttatgtagagatgtactggttggtgaaaagtacaagttaatttgttgaacgctactttgtgttatcgtttatatgataattaagtgatgagaaattaaatatatttcaaaagtatttatttcttgtaactagggtggtaccgcgaaaacgttcgtccctttgttggatgaacgtttttttatttataaatgtattaattatattaggagtgaaaaaatgaaaaaacttaaagcaagtgatatacgtcaaaaatatattgatttctttgttgaaaaaggtcatatggtagaaccatctgcaccacttgtgcctattgacgatgattcgttactttggataaactctggtgttgcaactttaaaaaaatactttgatggacgagaaacacctaaaaagcctagaatagttaattctcaaaaagcaattagaacaaatgatattgaaaacgtaggttttactgcgcgtcatcatactttctttgaaatgcttggaaacttctcaattggtgactattttaaaaaagaagcaattgaatttgcttgggaatttttaactagtgacaaatggatgggaatggaaccagaaaagctatatgtaacaattcatccagaagatgttgaagcctatcgtttatggcatgaaaatattggcttagaagaaagtcgtattattagaattgaggggaatttctgggatattggagaaggaccatcaggacctaacaccgaaattttctatgatcgtggtgaagcatatggtcaaaatgatccagcagaagaaatgtatcctggcggtgaaaatgagagatatttagaagtatggaacttagtgtttagtgaatataaccataataaggatcatacttatacaccacttccaaacaaaaatattgataccggcatgggattagaacgcatgacgtctatttcccaaaatgttcgtaccaattatgaaacagatttatttatgccaattattgaagaagtagagcatatatcaggaaaaaaatatcttgaaaataacgaacaagatgtagcatttaaagtcatcgccgaccatatcagaacaatctcattcgcaatctctgacggcgctttacctgcaaatgaagggcgtggttatgttttacgtcgtctcttacgtcgtgccgtacgttttagtcaaacgcttggcattaatgagccatttatgtataaattggttgatatcgttgctgacattatggagccatattatccaaatgtaaaagaaaaatcagattttattaaacgtgttattaaatctgaagaagaacgtttccatgaaacacttcaagaaggcgtatctatattaaatcaactcattacgcaagcaaaagaatctacacatcagattaatggttctgatgcgtttaaattatatgatacgtatggattcccaattgagttaactgaagaactagcaagtcaagaaggtattacagtcgacatggcaacatttgaagctgaaatggaacagcaacgtactagagcgagagaagctagacaaagttcacaatctatgcaagttcaaagcgatgttttaaaaaatattaatactaaaagccaatttgttggttatgaaacaacagattatcaaacaattttaacagatttaatttataacggtaaaactgttacatctgctgaagctggagaaacagtttactttatcttaaaagaaacaccattttatgcagtaagtggtggacaagttgcagataaaggaactgtaggaaatgatcagttcgaaatagccgttcaagaagttacaaaggcaccaaacggacaaaatttacaccaaggtatagttcaatttggacaagtaagtgtaaatagtcatgtagatgcaactgtaaataaagaagaacgtaaagatatacaaaaaaatcatagtgccactcacttactacatgctgcattaaaagagattttaggtgaacatgttaatcaggcgggttcactcgttgaaagtgaacgattaagatttgacttttctcactttggtccaatgacagaagaagagattgatcaagttgaaagaagagtaaatgaagaaatttggagaggaatttcagttcatattcaagaaatgcctattcaagaagctaaagaaatgggtgctatggctctgtttggtgaaaaatacggtgatattgtaagagtagtcaatatggctccattttcaattgaattatgtggtggtattcatgtagataatacggctgaaatagggttgtttaaaattgtaagcgaatcaggtacaggtgcaggtgttagacgtattgaggcacttaccggtaaagccgcatttttatattttgaagatattcaaaataaatttaattctgtcaaagaacaacttaaagtaaaatcagataaacaagtttatgataaagttgttcaaattcaagaaaatgaaaaacaattgaataagcaattagagcaacgtaataaggaaattacttcacttaaaatgggtaatatagaggatcaagtagaaatgattaatggatttaaagtattagctacagaggtagaagtatctaatccaaaagaaatccgtcaaacaatggatgattttaaatcaaaaaaacaagatacaattattattttagcaggtcatgttggtgaaaaagtttcgttaattgccgctgtacctaaagagcttacaagtcaggttaaagccggagatatcattaaaaacatggctccaattgtaggaggaaaaggtggcggtcgtccagatatggcacaaggtggcggcacacaacctgaaaacatctcagaatcattacgctttattaaagattatattaaaaacctataactttttaatcaactggtgtaaaattaatatgtaagttaatacatgtcagaggagtgtcgcatctatggaaaatattgataaaactatgaaattcgattatgatgaaattccaaaagaaaatgtccaaacagttttaaaaaatgtacatcagactctagaagaacgaggctacaatgctgtaaatcaaattgtcggctatttactttcaggagatcctgcatacattcctcgtcaaaatgatgcacgtaatcaaatacgacacattgatagagatgtaattatggaagaactcgtttcaaactacttaaaagagaataataaataaatgttacgtcataaaattttaggattagatgtaggtagtagaactgtaggtatcgcaattagtgatttgatgggctggactgctcaaggactagacactctaagaataaatgaagaaaatgaagaatttggtattgatagattggtttcaatcataaaagacaataatgttggttcagtagtcataggattaccgaaaaacatgaataattctattggttttcgtggagaagcttcccttaaatacaaagaattacttcaagaggctttaccaaatattgaaattattatgtgggatgaacgtttaagtaccatggctgctgagcgctcattattagaagctgatgtctcaagacaaaaaagaaaaaaagtaattgataaaatggcagcagtttttatactgcaaggctatttagattcaattcaataaaggagaatttcattatgactgaacataatcataatacagaattaaatattagtaatgaagaagaattattaacgttattcgatgaaaatggaaatgaagttttatatcgaaaaatgcttgaattttatcatccagaatttaaaaaagagtatgttattttagctgaagaaggtgctcaatctgatgatgatgacatgattgagctcattccaatgattaatgaaccagatgaatctggtgatggtggtaaacttgttcctattgaaacagatgaagaatgggatatgattgaagaagttgtaaatacaaatatggaagaataaacagtcttttgttaataataaatctctaatcaattcactttggttagaggtttttaatatttcaggcttaaatttaatttagaattatgataaaatatttaaagttaaattactgtagcataaatttttaaatatacagtcagttactatatttatacattaaaacataaagtaggtttattattttattttaaataatgtaatattagttgactgatttatttttatgcctattgatattaaaagggaagttatagaagtggaatcaaatcaatcctatttattaaatcttcatgaacagttaaataataatattgaagaactaagattttatgcagaagaacacgctgttcctatagtggataaattaactttagacatgataaaacaattaattagaattcatcattcgaaaaatattttggaaattggaactgctattggatatagttcgatgcaatttgcttctgtttcaccagatatttctattactactattgaacgtaatgagaatatgataaaacaagcaaaatttaattttaaaaaatttgaatacgaaaatcaaattcgtcttatagagggcgatgcgctatcacagtacgataaagtgagcaatcatttatatgatatgatatttatcgatgcagctaaagctcaatctcaaaaattttttgaatattatacaccgttattgaaaaatggtggcttagttattactgataacgttttgtatcatggatttgtatctgatatagatatcgtacgatcaagaaatgttaagcaaatggtaaaaaaggtacaaaaatataatacttggcttatgaaacaaaagaactataaaacaaattttttaaatatggatgatggtttagccatatctattaaaggagaatgaatatgactgaattacttgtcactccaaaatctttaaatcatatgaaaacattgatagaactcggtgctgatgcatttgtgattggagagcaaaaatttggattgcgattacccggagaatttaatcgtgaagatgttcgaaaagcagttaatttagcacacgaacatgataaaaaagtatatgtggcagttaatggtatttttcataattatcatttaaatgccttagaaaactatattgaatttttacatgaaataagagtagatagaattatttttggtgatcctgctgtcgtgatgtatgttaaaaaacaaaataatccgataccattaaattgggatgcagaaacaattgttacgaattatttccaatgtaattactggggtgaaaaaggcgctaaaagagctgtattagcacgtgaattaaacctagatgaaattttaaatattaaaaaacatgcaaaggttgaaattgaagttcaggttcacggtatgacttgtatgttccaatctaaacgtatgttattgggtaattattacacttttcaagatagacaaatgaaaatccaacgtagtgagaatgagcaagatttattattatacgatgaagaaagagaaaataaatatcctgtgtttgaagattacaatggtactcatattatgtctcctaatgatatctgtttaattgaagaattagagccattctttgaagcaaatattgattcatttaaaattgatggtatcttacatagtgaatcatacattaatactgttacagcacaatatagagaagccattgacttatatcatgaagatccagaagcttatgaagatgaaaaatttatgttaattgatccaatagaagaaattcaacctgaacatcgtccatttgatgaagggttcttatataaacaaacagtatattaagggaggcgccagtatgaagacattaaatgaaattgaagtaaatgctaaaagaaaaataaaaaaacctgaattattagcgcctgctggaaacctagagaagttaaagattgcggttcactatggtgctgatgctgtatttttaggtggacaagaatacgggttacgttctaacgctgataactttactatggaagaaattaaagaaggcgttgaatttgcaaaccgttatggtgcaaaaatttatgttacgactaatataatcgctcatgatgaaaatatagacggtttagaagattatttacgtcaattagaagctacaggtgcaacaggaattattgtagcagatccacttattattgaaacatgtaaaaaagtagctcctaaattagaaattcatctctcaacacaacaatctctttctaattacaaagctgtggaatattggaaagaagaaggacttgatcgagtagtattagctcgtgaaacaggcgctatggaaatgaaagaaatgaaagacaatgttgatatcgaaatagaagcctttattcacggtgcgatgtgcattgcttattcaggtagatgtactttaagtaatcacatgacagcacgagactctaacagaggcggttgttgtcaaagttgtcgttgggattatgatttactagctgttgatgaagagggagaattagatttattttatcaagatggcgaagttgtaccttttgctatgagcccaaaagatttaaaattaattgaatccattcctcaaatgatggatattggtatagattctttaaaaattgaagggcgaatgaaatctattcattatattgctacagtagtatcagtttatcgtaaggttattgatgcatatgcagaagatccggataattttaaaattaaaccagagtggttaattgaattagacaaatgtgctaatcgagatacagcacctgctttctttgaaggaacgcctggatatgaagagcaaatgtttggtgttcaacaaaataaaaagtcaccatatgatttttgtggattagttttagattatgacgaagcaactcatattgctacaatacaacaaagaaatcactttaaacctggtcaagagattgaattttttggacctgaaattgaatcatttaaacaggttattgatgtcatttatgatgaagaaggaaatcaccttgatgcagcacgtcatcctcttcaaattgttcaaattaaagtgaatcatcctatttaccctaataatatgatgagaaaggaaatcggctaatgacacagacaacaatcatcggaatcgctggcggttcaggatcaggaaaaacaactgtcacaaatgaaataatgaaaaacttagaaggccatagtgttgctttacttgctcaagattattattataaagatcaatcacacttaacatttgaagaacgacttgaaactaattatgaccacccttttgcatttgataatgatttacttattagtaatttaaaagatttgcgtaacggtcaatcggttgaagttccaacatatgattataaaaatcatactagaagtgatgaaacaattgcatttgaacctaaagatgttattatcgtagagggtatatttgctttggaaaataaaacattacgtgatatgatggatgttaaaatatacgttgatactgatgcagatttacgtattttaagaagacttgtacgtgacacaaaagagcgaggacgctcaatggaatcagttattaaccaatatttaaatgttgtcagacctatgcataatcaatttatagaaccaacaaaaaaatatgctgatattattattccagaaggtggaagtaataaggtggcaattgatataatgacaacaaaaatacaaacgcttgttgggaagcattaacgaataatatgtatttttcaaaattaaattaacttgttgaaaaggaagatgaacttatggaaaatcaaaaacaatatccaatgacacaggaaggttatgaaaagttagaacaagaattagaagaacttaaaacagttaaacgtcctgaagtagtagaaaaaatcaaagttgctagatcttttggtgacttatctgagaactcagaatacgatgctgctaaagatgaacaaggttttattgagcaagatattcaacgtattgaacacatgcttagatatgctttgattattgaagacaacggtgataataatgttattcaaattggtaaaactgttacgtttgtcgaattacctggtgatgaagaagaaagctatcaaattgttggatctgcagaagcagatgcgtttaaaggaaaaatttcaaatgaatctccaatagcaaaagcacttattggtaaaaatttaaatgatgaagttcgtgttccacttccaaatggtggagaaatgaaagttaaaatcgttgatattaagtaacaaaaaatccaaaaatcattttgatttttggatttttttatagttaaatatttataattatttaactataaattagatataagcaagtacattcatttaatttttagaactttcacatgacaaaaatataaatatatgcttaaataacaatgtagacaaattatataaatatcttgtactgaaagggggtaagcgattacattaatgcattacttaccttcttttattattgtctatttgaaagacatattaaactactatgaatacgtggatattttatattactaatatataaaatgaaatacgttatttataatcgaaggaggaccatcatctttggaaataaagattattaatgaacaatcaattgcgctttattttaaagaagaaatatctgaaagtaattacagagatgttgaatccgttactaaacatatacacgctaaaagaatagatggtatcaaagatgtgataccgtcatatagagcaattatgataaattttgataatataaagcttaattttaagcaattaatagatatattagatttaaaacagttaaatggtgaacatgctaaagatatttcagataaaacgatcatacatattccagtattatataattcagaagtcggacctgatttaccatatgtagctaaacataacaaactaactactgatgaagtcattcgaatccatactcaaaatgaatatctcgtttacatgttaggttttatgcctggttttccatttttaggtggattggattctcgtttacatactccacgtcgagatgaacctagagtcaaaattgacgcaggttcagtaggaatagcaaataatcaaactggtttatatccttctgattcaccaggtggttggcaaattattggaagaacaccattaaaagtatttgatatcaacgacgatgaaatgtctttatatcaagcgggggattatattaagttttattctattgatgaaaatacatttaacgacatccaaagtgaaatagcagaaaatcgatttaataaagaaaagtgggtgttaaatcatgtcgattagtattattcaacctggtatgtttacaactgttcaagatgaaggaagatttggttttcaacacctaggtttttcaagtgctggtgctatggatttatatagttatttaattggtaagactttaattggtaataatggacccagccttgaatatactattatcggtccaacacttcaatttaataaagataatacatttattttgacaggagcacatgtaaacgcaaaattaaatgaagagacagttgatattaatactgtaatttatgcatgcaaaggcgatattttgaaagttggagcagtgactgcaggcgcccgtggttatattttctttggccatcctttagatattcaaccaatagcagaaagttattcgacacatactagaagtaaaattggtggttacaaagggagaccattatcaaaaggagatttgatatacttaaaagaaaatccatctttcaaacaaaatttgggtaaaacaacagtttataatgctattcccgaagataatataatacatattattaccggtccacaaattgaagcattttcaaaggaaagtataaataagctcgttaatatggaatataaagtttctgaaaaatctgatagaatggggtatcgtcttaatggtgagcatatccctcctaaaactggagcagatattatttcagaacctgttgctttaggaagtattcaagtcccaaatgatggtaatcctattatcttattaaatgataaacaaactataggtggctatacgaaaatcgctacagtcactcaactggatttaaataaaattgctcaatttaagccgggagatttaattcgatttaagtggtcaacgattgaagagtctgcaaaggttcaggaacaatatctaaatcactttaatcatttaaatgctgaaattaacacgtcaccaacctttaatatgggtgaaatgagaccgacagcaaagaaattgactaaaatcattacagaggagagatagttatggatattaaaaaaatagaagaagtcattaaacttgtaaaatcaaatgatgtaaaaaaatttaaatataaagataacaaaaacgaaatcgaattagattttactgaacaaagtaacaatcaaaataatagtactccagtaatacaatttgaagggaattctcaagacaaaagtatttcagaaaataacccttcaaatgattcatcaaaaacaattacttctcctatggtaggaacattcttcttacaagatagcaaggaattaacggatcctataattcaagtaggtgacaacattaaatctggtgatattatcggatatgttgaagcaatgaaagtaatgaatgaagtgactagtgatatagatggtgagattaccgacattgttgttgaacatggtacaaacgttgaatacgatcaagttctagttaaagtaaaataaagggggcaaaaatatgtatcgttgtttagtagcaaatagaggagaaattgcggtacgtatcattcgagcgtgtcgagaaatgggaatagaaactgttgcagtatacgctaaaggtgatgaaaaaagtcttcatgtaaatttggctgatcaagcagtttgcattggagaagcaaatcctttagatagttatttaaatatagaacgtattattggtgcagctgaaatcacaggttctaatgctattcatcctggatacggatttctatcggagagtacaacatttgcccaaaaagttgaagaaaatgatattcattttattggccctaacaaaaaaacaatggaaatgatgggtgataaaataactgctcgtcaaaccgttcattcagcaggggtaccagttattcctggctcaacagatgcagtaaattctgtagaagaaatcaaagaattagcaaaagacataggatatcctttagtattaaaagccgcaagtggtggtggcggtaaaggtattcgaattgttaaagaagaaaatcaacttgagaaatcattaaaagaagctaaaagtgaaggtcaaaaatattttaatgatgatcgagtgtatgtagaagcatttattcctgttgcaaaacacatagaagttcaagtgattggtgacggaaaagaaaattatgttcatttaggtgaacgagattgttcagtccaaagaaaaaaccaaaaattaatagaagaagcaccatgtgcagcactgtctgaagaacgacgtgaaaaaatatgtaatgatgctgtcaaagttgcaaaagcctctaattatcgtagtgctggtactattgaatttttagttactgaagaggcacattactttattgaaatgaacgcgagaattcaagtagaacatactgttactgaaatgcgtgcagatagagatttattacaagcacaattatatttgttattacataataaattaccgtttagtcaagaagatattgtattcaatggtcatgtaattgaggcacgtattaacgctgaaaatccagaaaagaaattccaacctactccaggtaaagttaaacgtctacacttacctcaaggttttaatattagagtagattcgttattatatgctggttatcaagtatctccttactatgattcactagttgcaaaagttatcgtaaaagactctaacagaacttctgcgattaacaaattaaaagtggcacttgacgaaatggtaattgatggtttcactactacggctgattttctatatgcagtattaagttacccaccatatgcaaaaggaaatgcaaaagaagttgatattaaattccttgaaaaacatcacatagttaaaggagtaaaattatgatgaaagttgatttaaactgtgatctaggtgaagcatttggtaactattcatttggaggtgataaagatatcattcctttaattacatctgctaatattgcctgtggttttcatgcgggtgatgaaaatgtaatgaatcaaacagtaaaattagctaaagaaaaccatgtgagtattggcgctcatcctggacttccagatttaaaagggtttggtcgtcgaaagatggatattaatccaaccgaagtatataatctaatagtttatcaattaggtgctttagaaggattttgtaaagtacaccaaacacgaataaatcatgttaaaccacacggtgcactgtataatatgggtgctaaaaataaagacattgcaaaagcaattgcaaaagcaatatacgattttgattctgcaataatgcttgtaggtttatctaattcattattaatatctgaagctaaagcaattggattgaaaacagcttctgaagtgtttgctgatagacgttacgaagataatggacaattagttaatcgtaaagaatcagacgcagtcattactgatactgacgaagcactaaaacaagttttgaaaatggtaactgaaaacaaagtgataagtcgcaatgggaaagaaattgatttggaaacagatacgatatgtgtccacggtgatggtaaacatgcactagaatttgttgaacaaataagaaaaaaattaacgaaagaaggcattgatattcaatccttataagggggttttctaatgaaagaaagtttaaatcaaaaacaagataaagacaattttaaatttacaaaaagtcatagacgcttactttatggatctgtatttttaatggctacatcagcgattggtcctgcatttttaactcaaactgctgtgtttacggcagaattttatgcaagtttcgcttttgcaatcttaatctctatattaattgatattggagctcaaattaatatttggcgtgtattagttgtaacaggtttacgtggtcaagaagcatcaaataaagtgttacctggattaggaactttaatttcaatattgattgcttttggaggacttgcttttaatatcggaaacatagctggtgctggtttaggattgaatgcaatgtttggacttgatgttaaatggggagcagcgattacagccatttttgcaattttaatatttgtaagtaaaagtggtcaaaaaattatggatattgtttcaatgattttaggagtaataatgatattagtagtagcttatgtcatggttgtatctaaccctccctatggtgatgcacttatccattcagttgcaccagaacaccccattaaattaattttaccaattattactttagttggaggaacagtaggtggatacatcacatttgctggcgcacatagaatacttgattctggaatgaaaggtaaagagtttttaccatttgtgaatcgttcagctattgcaggtatcttaactacaggtattatgagaacattattattcttagcagtacttggagttgtagtgacaggtgtcactttaaatgcagataatccgccagcatcagtatttgaacatgctattggaccaataggaaaaaatatttttggagttgttattttcgcagccgcaatgtcatcagtgatcggttcagcatatacaagtgcaactttcttaaaaacattacacaaatcattatttaataaaaataatttgattgtcattgtcttcatcgtgatttcaacaataattttcttattaattggaaaaccaattagtttattgattattgctggagcaataaatggatggattttaccgattactttgggtgcaatattgatagcgagtagaaaaaaatcaattgttggagattataaacatccaacatggatgctagtatttggcattgtagcagttattgttacaattataacaggtatattgtctctacaagatttagctactttatggaaaggttaatcataaataaatatctaatttaggattttaaaatttaactgtcgacagtgtttaactgtatcgacagtttttttattaaatcatttacaagattattttaatagaaaaagttagtcgtgatgaactagaaattatgttagaataacatgtgctaagattaaagttgaggtgtaaatatgattggaattattggagctatggaagaagaagtagcgattttaaaacataaattagtgaatttaaatgaggttgaagtagcacatgtaaaattttatcgtggtcaactaaatgataaagatgttgttttaacacaaagtggaattggaaaagtaaatgctgcaatatccacaacattgttaattgaaaaatttaaaccaacattaattataaatacaggttctgctggtgctttagatgacagtttatcagttggagacattttaattagtaatcatgtgatgtaccatgatgcagatgcaactgcttttggatacgacatcggtcaaatacctcaaatgccagctcaatttgaagctaaccaacaattactccaattaactgaaaaagttgtaaaacagcaaaatttaaccgctaaaattggtcaaattgtaagtggcgatagctttattggtagtagcgaacagcgattaaaaattaaacgtcagttttcagaagctatggcagttgaaatggaagcaacggctattgctcaaacttgttatcaatttaatttaccttttatcgtcactcgtgctgtttctgatttagcaaatgggaaagcagaaatgtcgtttgaagagtttcttggtaaagcagctcaatcatcaagtaacattgttgaacagttggttaaagaaatataaacaataaataatttaaaggtgaaatgaatgggattaattaaaaaatattttatgcctagtgattatgtacaatctgtatttcaaattgatattgaaaagttagcaaattctggttttaaaggtattattacagatttagataatacattagtaggttgggacgttaaaacaccaacgaaagaaatacaagaatggtttaaaaaagcaaatgatttaggattaacgattacaattgtatcaaataatagtgaaaaacgtgtttccggtttttcgaaagacttagacgttgattttatctttaaagctagaaaacctatgggaagagcttttaaaaaagctatacaacacatgaatattaaaccagaagaaacagtcgttataggtgaccaaatgcttacagacgtacttggtggcaataataacggtctatatactatcatggtagttcctgtcaaaaagacagatggatttttaactagactaaatagaataatcgaacgtcgattattaaactattttaaaagaaaaggctatattacatgggaggaaaattgattggatgaaactttaaaatgtatcggttgtggcgctcctttacaatctgaagataaaaacgcacctgggtatgtgccagaacataatttatttagagatgatgttatatgccaacgttgttttagattaaaaaattataatgaaatacaagatgtaggaatggatagtgaagattttttaaatttattaaatggattatccgatagacaagggattatcgttaacgtaattgatgtttttgactttgaaggatcgtttattaatgctttaaaacgaattgtaggaaataagaaaatcattttggcggcgaataaattagatcttttaccaagacaaattaaccaacgtcgtgtaaaagaatggttaaaaagaacagctagaaagtatggattagaagctgaagaggtggtattaatatcagctcataaaggatggggtattgatgcacttttagaatcaatcaaccgttttagaaatcatcaagatgtttatatcgttggtactacaaatgttggtaaatcaactttaatcaataaattaattgagcaaagtgtaggtgaaaaagatgtcgttacaacatcaagatttccaggtacaacattagatatgatagatattcctttagatgagaacacatttatgtatgacacacctggcattatacaagcgcatcaaatgacccattatgttactgaaaaagaattgaaagtgattattcctaggaatgaaattaaacaacgtgtatttcagttaaatgagggacaaactttattcttcggtggattagctaggatagattatgtttctggtgggaaacgaccacttgtatgttatttttctaatgatttaaatattcatagaactaaaattgaaaaggcaaatgatttatggcgaaatcaaatagggcatttattaagtccacctagtaaccccgaaaaatttaatataagtgatatgaaagctgtacgtctagaaacagggaaagaaaaacgtgacattatgatttctggattgggctttattacactcgaagcaggtgcaaaagtgattgttcgtgttcctaaaagtgttgatgttgttttaagacaatctattatgtagggaggattcataatgaaatttgcagtgataggagatccgatttcacattcattatctccagtgatgcataatactaattttaaagttttaggtttaaatgatacttatgaagcattgcatataccggttcaagatttcgataatattaaagaaataataactgaaaaaaatttaagtggatttaatattactattcctcataaagaacgcattattccattcttagatgatattgatgaacaagctaaagctgtaggtgcagtgaatactgtgaaaatagaagggaataaatggattggttataatactgatggtcttggatacgtaaaaggattaaaacaagtatatcctgacttatcaaatgcatatattttaattcttggagctgggggtgcaagcaaaggtattgcaactgcactttcacaatgtgtacaacctaaattaactatagcgaatagaacaatgagtcgctttgataattggaaattagatattaatgcgattaccctacaacaagctgaacaatatcttgatgagtttgatattattattaatacaacatcagcaggattagataataataaagagagtgtaattcgtctcgatcaattatcaccgaatacattggtaagtgatatcatttatattccctataaaacatcatttttacaacaagctgaagagaagggtaaccctatttataatggtctagatatgtttgtatatcaaggtgctgagagctttaaaatatggactggcaaagatgctgaaattaaagaaatgaaattagcagttttaaatcaattaaaaggagaataatatgctatgctaacaggtaaacaaaaaagatatttaagaagtttggcgcataacattgatccaatttttcaaataggtaaagctggaattaatgataatatgattagtcaaatagatgaaacacttgaaaatagagaattaattaaaattcatatacttcaaaataattttgatgataaaaacgatttagcccaaacgctaagtcaagctactaatagtgaagtggttcaagtcattggatcaatgatagtcatttatagagaatctcaagaaaataaggaaatttcattaccataattctatgaaaaaaattgttttatacggcggacaatttaatcctattcatactgcacatatgttagtagctaatgaagtatttcataaaattaaaccggatgttttctattttttaccaagttatatggctccacttaaagaacataacgattacttagatgctcattatcgcatcaaaatgattaatatggtaattgagcagttaggtttcggaaatatttgttatgcagaattagaaagaaaaggtcaaagttatacgtatgatacattaaaagctttaattgaccaaaatccttacgataagttttattttgtaataggatcagaccaatatgatcaacttgataaatggtataaaatagatgaattaaagcaaatgattatctttatagtagtaaatagagaaaaaaatattcaaaaggttgatgaaaatatgatttccatatctattccaagaatggatattagttcatcaatgattagacaacgtgtaaaagataaaaaaacaattgatattttagtccctcgaaatgttagtaaatatattagagaggaaggattctatgaacactaaagaagcaaaaaaacttatcgaaaataaattgcccgaaaagcgttttaaacattctcttagagtagctgacacagcagttaagcttgctgaaatctatgatggagataaaagtaaagcagagttagcaggcattttacatgattattgtaaatatgatgatttaggaaaaatgtatcaagtcgttcgccaacatgatttagatagcaatttgttaagttatggaagtgaaattcttcatggacctgtatgtgcagcattaatgaaggctgattatggcatcgaagatgaagaaatattattagccattaaatatcacactactggtcgtaaagaaatgacaaaaactgaaaaattggtatttattgctgactatatagaacctggtagaaaaactccaggagttgaagaaattagagatatggcatacaatcaaggtagcttagataaaacaatttatgaaatatcaaaacgaacagtcttatttttaattagtaaagatattactgtttatggttctacgattgaatgtttaaattattataattatagtgatcaaaagataaaggatgattaaatgaattcagaagaattattaaatattgctgtcacagcgacagaagataaaaaagcagaagatattgtttctcttaatatgcaaggtattagtgatatgactgattattttgtagtgtgtcatggtaataatgaacgtcaagttcaatcaattgctagagcagtaaaagaaaaagtgcatgaaaataatattgaagtaaagcgtatggaaggttatcaaagtgcaagatgggtcttaattgatttagcagacgtagtagttcatattttccataaagatgaacgcaattactataatatagagaaactttatcaagatgctccaatagaatcatataatcaggtagcatattaaaatgatgcaatacactgaaatgagtaaagtttatgatcagcttactcaagatcaaccttatgaagaatggtttaatattgtaaaatattatacaagaacaatgtcttctaatgattcaataaatattcttgatattggttgtggcactggaagtttaacgcaattacttccttctattggaacggttacaggcatggatttaagtacagacatgttatctattgctgcaaataaatctaatcaagttacttggttagaaggtgacatgaacgatttttcattaaatacaacatatgatgttgtaacaatattttgtgattccctgaattatttacctgatattgatgatatcgtaaatacgtttaattgtgtatttaatcatttatctcatttaggaatgtttatattcgatattcatacgatatataaaatgaacacagcatttaataatcaatgttatattgatgataatgataatatatttttagcgtgggaagctataaagggtgaagaaccttatagtgtttatcatgatatgagtttctttttaaaacagcataatggtaattatcaccgttttaatgaatcacactatcaaagaacatttgaaaaagatttctatattcgattgttaaaacaaactggatttaatcgtattgaaacttttgtagactttgacatcaataatcataatgaaaaaggtgacagattgttttttgttgcttataaataaaataaagtaaactcatctccttatacgtttatacatataaggagatgagtttttgtttaagtatagaaatgaaataattcaattattaactaagtggaagactcatatcatcattttaattgcagtagtgttactttttatagtgattctcatgcttatgaaaaataatgagacttcagaacatatgacaacatctaatgctaataatagccaatttaataataatgaaaaatataataaaaataaaaatgataataatttatccacttcttctaaagaaaattcaactatttatgtagatgtcaaaggggctgttaaattaccagatgtttatgaaatgaaaaagaacgatagagttaaagatgtattaaaaaaagctaaagtttctgaaaacgctgatattacaaaaatcaatttatctgaaaaacttactgatcaaaaaatgatttatatacctaataaaaatgaaacgaaaataaatgctacacccactaatcaaagtaatttaaatacttctgaaagtattaaagtcaatcttaacacagcaaatgaaagagaattgcttaatgttccaggtatagggccaactaaagtgaaagagattattaaatacagagaggaaaagggacagtttaataatgttgaagacttaaaacaagtaagaggaattgtagggaaaacttttgagaaacttaaagattactttactacataaattaaattggaagaaattttaatataaattataatagatatatatttttttaaggagttgaactttatggatagaataaaatgggatgaatattttatggcacaaagtcatttgcttgcattacgttctacatgtcaacgattatcagtaggcgcaacaattgtaaaggacaatagaataattgcaggaggttataatggctcagtagcaggagaagttcactgtattgatgtaggatgtttaatagaagatgatcattgtattagaaccatccacgcagaaatgaatgcattattacaatgcgcaaaacaaggtgtatcgtcagataatgcaacgatatatgtcacacattttccttgtttaaactgtactaagtctattattcaagcaggtattaaaaaaatatactatgcaaaagattatcataatcataaatatgctattaaattattaaatcaagcaggtattgagtatgaaaaaataccattttctgctaataaaatagctgaatttttaactaaagaatgttagttgttttatatgcactttcttttttaagtggtatattatgggttcatcttaaattattttcaattttaatatttactattatattaattattgtgtatcgaaagagtattcctttataccactatttattaattctatcctttttctttctagctttatttcaagtacaccatactttgaaaacaaatcatttaatactccaaaatttaaaagtccacagtaatatacattcaaaagtaacgtttcaaaatgatataaaacaattcaatcaaattattaaaggacaatttcgatataaacataatctttatcactttacttttaaaagtccacaattgagagctaaagatttaaaaaatcgagaatgtaaaattaatggaaatatcacaaatagtattcaaaatgaagtctatgtttatatcaatcaaatagataataaatattgtactaaggttaatcatataagttttatagataaacacctaaattatattcaaaacaagttatatcattcttcgttaaaatatccagagagagtattagctttaattactggggatactggtgcaattgatacagattacttagataaagttaaagctataggtatttatcatttacttgctgtcagtggatcacatgttgctaccattatttttatcattcaatatagtctggtcaggtttaatattccaaaattatttatacgagtttttattattataatactaatactatttattttttatacaaattttgcaccgagtgctttaagagcagttttaaccgctattactttttttattatccctaaggcttttaaaatttcgtctataagtgtattatctttagtctttttattgatgacaatttggaatatgaattttgcttatgatattggatttcaattttctttcatcatttctttttttatactactttctaagccactatttaataatcaatcaattttaaagaattatatttatataacaattatcgctcaattttcatccatgattattagtatttaccattttaatcagtttcaatggattggttttatttctaatgtaatatttgtcccattatattctttcattatttttccactttctattgttttatttattttctatcatttctttagtgacttgcgatatataaatatggttgcaaatcaattatttgaactgcacgatagaataatgcaaccgttcattttatttagaaattaccaaataaatatcgctgatcaatcaaatttaagtctactatactgtttcattttattaactctactaactacatttatatgttataaaaattatagagtattcttaattataattatcttatttataatatttttaagattcactaatcaaccattagcgacgacgtttactgctttaaacgttggccaaggtgatagttttctttttcaaacaaaaaataatgaaactgtgatggtagatactggtggtaaagtagttcaaacgaagattaaagataatcataatattgcgaaatatcatattattcctactttaaaatctagaggaatatcaaaaattgatcacttaattcttacccatccacataatgatcatatcggcgaatttccttatttagcacaaaatataagaatcaaaaatttatatttatatataaaaagttattctatagaacaaattaaaactatacatacaacttgtagtatatatcatataaaagttattgatgtttcagagactaataaaattcagttgaaagaagctaaaatatcatttttaaatgcttttattgattccaatgaagacaaaaatgcacaaagtataatctcattaatagagtacaaaaattacaaattattattgatgggcgacgcaattgaagaaaatgaaaatttattattaaagaaatatcatttaccgttaattgatgttctaaaagttggacaccatggcagtaaaacaagtagttcaaaacatttgttagaaatcatacaacctaaaataagtattatttcaagtggaaaaaataatacttttcatttgcctaataatgaaacgatagataaattagagaaaattaattctcatatctacaatactcagactgatggagatattactttaaatctcgataatcaacttatatcatcctttaataaaagttaatgatagagaataataattacacaatgctataataacttaatggtagaattttgaaagggtgcaagtttacatggctaataatataatggctatatacggagaagtgccagaactagtggagaaaaaaagtaatgaaatcgtagaaagttacttaaatgaaaaaaaagacgattttaactatgttaaatataatctttatgatacaagttttaatcagattatggaagaagcattaacgatgccttttatttcagagaaaaaagctatcgttgttaaaaatgcttttatctttacaggtgagaaagtttcaaaagatatccaaccaaacaacgaacaagtgaacgaatttttagaaaaatatgatggagaaaattttatcatttttgaagtgtatcaaaataaattagatgaaagaaagaaaattactaaaactttaaaaaagacaagcaagctaactaaagttgaacagatgtctgaacaagagattaaaaaatggataaaaaataaacttcatgaaaattttaaagatattaaacaggatgcattagatttatttatagaattaactggtattaactttaatatagtttcgaaagaattagaaaaaatcattttattcttaggagagcgaccaactataaataaaaaagatgttgaagagattattaatagaagtttagaacaaaatgtttttcttttaactgaatatatacaaaaaggagaaaaatataaagccattcaacttattaaagatttaatagtaatgaaggaagaacctattaaactattagcattaataacaagtaattatcgattatattatcaatgtaaaattttaagtcgaaaaggatatagcggacaacaaattgctaaaacaattaatgtgcacccatatcgagttaaattggctttaaatcaagtaaaacattatcaattaactcatttgctaaatattattgatcaatgtgcagaaactgattataagttaaaatcctcatatatggataaacaactgattttagaattatttattctttctttataaataaaaaaagttcaagctaatcgcttgaactttttaaatgattatttgcttgaagacattaattgagatttaatgcggtcagctttatttgaatgaattaagttactgtgtgcagctttatcaactgatttaattgcgaagttaactaattcagctttattatcagcattattttcaattgctgatttagcatttttcactgcagtacgcatagcgtttttttgtgaaatattacgttcttcagcagtttcagttgttcttacacgtttaatagcagatttaatatttggcattactgtcacctcctaaaagtaatctaagcatatcaaattttattttgattacaacaagaaatattttatcaaaacatgaatatttgtgcaatcatttattaacattaaacctatttatttacaaaaagaacgatattaactattggaaacctttatacaacactttataattgttatgtagtttaagaaaaatcttaaaattaaaagtaaataaagaatcttcacatgatgattcttttctcttaaatttgcaaataatgattaaaaacgatattatgtcaaagatgtatacacatacgggtaaatttacgaaagcgagaatgataagttatggatatgcaagaacgctataaccgaagagacaatataagaaacttttctataattgctcatattgatcatggtaaatcaacgttagcagatagaatattagaaaatactaaatctgtagaaactagagaaatgcaaaatcaattgcttgattcaatggatcttgaaagagagcgcggtattacaattaaattaaatgctgttagattaaaatatgaatctaaagatggacagacttatacgtttcatttgatcgatactccagggcacgtcgatttctcatatgaagtttctcgttcattagctgcatgtgaaggcgctattttagtagttgatgctgcacaaggcattgaggctcaaactcttgctaatgtttacttagcactagataatgatttagaactcttaccggtagtaaataaaatagatctacccgcagctgaaccagaaagagtaaaacaagaattagaagacgttattggtttagataaagatgaagttgtgttagcaagtgctaaatcaaatattggtattgatgaaatcttagaaaaaattgttgaagttgttcctccaccagaaggagatcctagtgcaccgcttaaagctcttatttttgattcagagtacgatccttatcgaggtgttatttcttctattcgtgtaatggaaggcgttgtaaaagctggagatcgtatcaaaatgatggcaacaggaaaagagtttgaagttactgaggttgggattaatactcctaaacaactaccaattgaagaacttacagtaggcgatgttggatatattattgcaagtattaaaaatgtcgacgattcacgtgttggggatactatcactcatgtagatagaccagcagatgctccgttaaaagggtataaaaagatgaatccaatggtttattgtggattgttcccaattgataataaagattataacgatttaagagaagctcttgaaaaacttcaattaaatgatgcatcattagaatttgaaccagaatcatcacaagcgttgggatttggatttagaacaggattcttaggtatgctacatatggaaattattcaagagagaattgaacgagagtttggaatagaattaattgccactgcaccttcagttatatataaatgcgaaatgaatgatggttcagaagttatagttgataatccatctcaaatgcctgaacgtgatagaattaaagcgatttatgaaccatatgtaaaagcaacaatgatggttccaaatgactatgtaggagcagttatggaactgtgtcaacgtaaacgtggccaatttataaacatggattacttagatgatatccgtgtaaatatcgtttatgaaattccattgtcagaagttgtatttgatttctttgaccaattaaaatctaatacgaaaggctatgcttcatttgattatgaatttatcgaaaataaagaaagtaatttagttaaaatggatattttattaaatggtgacaaagtagatgcacttagttttatcgttcacagagattttgcgtatgaacgaggtaaagctcttgttgaaaagttaaaaacacttattcctagacaacaattcgaagttccggttcaagctgcaataggtcaaaaaatcgtagcccgaactaatattaaatctatgggtaaaaatgtgttatctaagtgttatggtggagatatcagccgtaaacgtaaattacttgaaaaacaaaaagctggtaaagcaaaaatgaaagctgttggtaacgtagaaataccacaagatgctttcttagctgttcttaaaatggatgatgaataaattattaatgcgaggctggaacctacaatcatgtgttccaacctcgtttgtgttttaaaaacttaaaattgagggtgtaactatgtcaataaaaagtgcgtatattcatatacctttttgcgttaggatttgtacatattgtgattttaataagtactttattaacaaacaaccagtagatgaatatatttctgcattaattaaagaaatgaaaacaagtgaaattagaaatcttgaaacaatgtacgttggaggaggtactcctacagctttaaatctcaagcaacttgaaacacttttaaaagcaatacagtcaactttttcaattaaaggtgaatatacatttgaagcaaaccccgatgaattaactttagataaagtgaaattactgcactcatatggtgtaaatagaatttctatgggtgtacaaacatttaaaccagaattactaaaaattctaggtagaacacataaaactcaagatatatataatgctgtagattatgctagaaaagcaaatattgaatcgattagtttagacctaatgtatcatttaccaactcaaacattagacgatttttcagatagtcttaatagagcaatacaaatggatatagatcatatttcaagttatggattaattttagaacctaaaactcaattttataatatgtatcgaaaaggcaaattaaaattgccaaacgaagatctaggagctgaaatgtaccaatatttaatgaatgttttaggaaaaacttcatttaaacagtatgaaatctcaaatttcgccaagtctcatcatgaatcaagacataataagacttactggctaaatgaagaatattatggttttggagcaggcgcaagtggatatgtaaatggagaacgctattcgaatctcaatcctgttaatcattacatcaatgctattaataatcatcaacgtcctattttaacttccaatttccctactcaatcagaaagaatggaagaagaaatgtttttaggattaagaatgaataaaggtgtcgataaagttaaatttctttcaaaatttggtacctcaatggataaagtgtttggtgagacaataaataatctgaaaaagaaaaatttactctatgaaagagataaccatatttcattgacaaacaggggaaaaatcattggaaatgaagtttttgaagcatttctattaaattaataaatttttttgaaaaataagagctttaacgttgacttactttgaccaatttgttaaattataattagcacttgagacaaaggagtgctaatgaggtgaagacatgattacaaatagacaattaagcattttaaatgcaattgttgaagattatgttgatttaggacaaccgataggttctaaaaccttaattgatagacataacttaaatgtaagcccagctactattagaaacgaaatgaagtatttggaagagttgaattttttagaaaaaattcattcatcttcagggcgtgcaccttctgaacaaggttttagattatacgtcaatcaattgttaaaacaaacatctcatcaaaaacaaaataaagttcaacgtttaaatcaacttttgattgagaatcattatgatatttcttcagcccttagttattttgctgatgaattatcaataaaatctcaatatgcaacgttggttgttcgacctaatcacaaaacagatattataaataatgttcatttgattcgtgcaaattcgtctataattataatggtcatcatctataattctggacatgtagaacatttacatttaagtgaatcaatggagtttgacgatgataggttaacaaggatttcaaattttttgactgataattattataaaagtcaatttgattttaataagaagttaaaacaatttacaaattctattgcggaacaatcctttataaatgaattaactatcatgctaacttctcatctccataaacaaagtaatagcatttttatgggtggaaaggttaaacttattgatgcactgaacgaaaccaatgtttcttctattcagccaatcttacaatatctagaatcagaaaaaattatcgagttactagaaaatatttctacttctgaaattaatgttaaaattggccacgaaatagataaagggttaagtgatatttcaattataacgagccagtaccattttgatgatgcactaaaaggacaaattgcggttatcggaccaactgcgatgcattatcaaaatgtgattcaattacttaatcaaatatggtgaatctaattgtaattatattggagggcataaaatgacagaaaaagacgaatcagtgaaaaataacactgaagaaaatgaaaccgttaaaaacgaagcgtcgtctttaaatgatgtagaaaataatccttctgaagaagaattaaataatgaatctacatctgaacatgataatgaagataaaaatgatcaatctaaagacgaagagattcaacaattacaattaaaagcaaatgaaaatgaagaaaaatatttaagattatatgctgaattcgaaaattataagcgtcgaattcgaaatgaaaatgaaacaaataaaaaatatcaagctcaacacgtgcttactgatattttacctactatcgataacattgaacgtgcactgcaaattgagggtgatgatgaatcatttaaatctctcaaaaaaggcgttcaaatgattcatgaaagcttattaagagcattaaaagacaatggcttagaagaaattgaatctgaaggtcaagaattcgatccaaacttccatcaagctgttgttcaagatgacaatcctgattttaattctggtgaaatcactcaagaattacaaaaagggtataaattaaaagatagagttttaagaccatctatggtcaaagttaatcaataagatttaaatttgaaaaatttttaaaattggaggaattttattatgagtaaagtaataggtattgatttaggtactacaaattcttgcgtatctgtattagaaggagacgaacctaaagtaattcaaaatcctgaaggtgctagaacaactccatcagttgtggcatttaaaaatggtgaaactcaagtaggtgaagttgctaaacgtcaagcaattacaaacccaaatactgtacaatcaattaaacgtcatatgggtacagattataaagtagatattgatggcaaatcatatacaccacaagaactttcagcaatgattttacaaaatttaaaaaacactgctgaaagttatttaggagataaagtggataaagcagtaatcactgtgcctgcttatttcaatgatgctgaacgtcaagctactaaagatgctggtaaaattgctggtttagaagtagaacgtatcattaacgaaccaacagctgcagcattagcttatggtttagataaaactgaacaagatcaaaaagtcttagtatttgacttaggtggcggtactttcgacgtttctattcttgaattaggcgatggcgtattcgaagtattatcaactgcaggggataacaaacttggaggggacgactttgaccaagtaatcatcgactatttagtatcagaattcaaaaaagaaaatggtgttgacttatcacaagataaaatggcgttacaacgtcttaaagacgctgcagaaaaagctaaaaaagatttatctggtgtatctcaaacacaaatctcattaccattcatttcagctggagaaaatggtccattacacttagaaatcaacttaactcgttctaaatttgaagaattagctgattcattaatcagaagaacaatggaaccaactcgtcaagcacttaaagatgctggcttatctacttctgaaattgatgaagttatcctagttggtggttcaactcgtattcctgcagtacaagaagcagttaaaaaagaaattggtaaagaacctcataaaggtgtaaacccagatgaagttgttgcaatgggtgctgctatccaaggtggcgtaattactggtgatgttaaagacgttgtattattagacgtaactccattatcattaggtatcgaaattatgggtggtcgtatgaatacgttaattgaacgtaatacaacaattccaacatcaaaatctcaagtatattcaacagcagctgacaatcaaccagcagtagacattcacgtattacaaggtgaacgtccaatggcttcagataataaaacattaggtagattccaattaactgatattccaccagctccacgtggtgtacctcaaattgaagtaacatttgatattgataaaaatggtatcgtaaacgttactgcaaaagacttaggtacaaataaagaacaaaatattactattcaatcaagttctgcattatctgatgaagaaattgatcgtatggttaaagatgctgaagaaaatgctgaagcagataaaaaacgtcgtgaagaagtagacttaagaaacgaagcagatagcttagtattccaagttgaaaaaacaattaaagacttaggtgaaaatatcagtgaagaagacaaatcaaatgctgaaagcaaaaaagatgcacttaaatcagcattagaaggtcaagatttagatgatattaaagctaaaaaagaagaattagaacaagtaattcaagaattatctgctaaagtatatcaacaagctcaacaagctcaacaacaagcacaagacaattcacaacaatcaaatgatagcaatgttgaagacgctgagttcaaagaagttaaagacgacgaagataaaaaataaagctaatcgtttataacgtttactatgtaaacatttataaatgtaagccaaaaagtcaaagtcaattgaacattggctttgactttttcttttataattaagatacttgagtatgtgtttaaattataaaaatttagaaaaggagagatacttgtggctaaaagagattattatgaagttcttggcgtaagtaaagatgcttcaaaagatgaaattaaaaaagcataccgtaaattatcaaaaaaatatcatccggacatcaataaagaagaaggcgctgatgaaaagttcaaagaaatttctgaagcatacgaagttctaagtgatgacaataaacgtgcaaattatgaccaatttggacatagcggtgcccaaggtggatttggcagtcaaggatttggtggacaagacttcagtggcttcggtgaaggctttgaagacatatttagctcattctttggtggttcacgtcaaagagatccaaatgcacctagaaaaggtgacgacttacaatacactatgactttagaattcgatgaagctgtttttggtactaaaaaagaaatttctattcgaaaagatgttacgtgtcatacatgtcatggtgatggcgctaaaccaggtacaagtaaaaaaacatgtagctattgtcatggttcaggacatgtatctgttgaacaaaatacaattttaggacgcgtaagaactgaacaaacttgtcctaagtgtgagggtagtggtcaagaatttgaagaaccatgtccaacttgtcatggtaaagggactgaaaataaaacagtaaaattagaagtaactgtacctgaaggtgtagacaatgaacaacaaatccgtcttgctggtgaaggtgcacctggtgaaaatggcggtccacatggtgatctttatgtagtattccgcgttaaaccttctgataaatttagaagagatggcgatgatttattctatgaacttaatattagcttcccacaagcatcacttggcgatgaaatcaaagtaccaactctaaacagtaacgttatgcttacaattcctgctggtactcaaaatggtaaacaattccgtcttaaagagaaaggcgttaaaaatgttcatggatatggccatggtgatttatttgttaatataaaagttgtcacaccaaataaactaactgatagacaaaaagaattaatgagagaatttgcggaaattagtggtgaaaatccggaagaacaacctgctaattttaaagacaaagctcgtaaattctttagaggtgaatagtcatgaactggacagaatttgcagtcactgtaaatcatgaagttgaatctttagtcactaacatattagaaaactatggttcaaatggagtagttatagaagattccaatgatttaattaatcaacctactgataaatttggtgaaatctacgaattaaaaaaagaagattaccctgaacaaggtgtgagattaaaagcatactttaatgaattgaaatataacactcaatttaaaaataaattagaaaatgaaatattaaatttgtatcttatagatgattcagtagttgagttttcagcaaagactattgctgaagtagattgggctaatgaatggaaaaattattttcatcctttcagagcttctaagagatttacgattgttccaagttgggaagactattcaaaagaatcagaagatgaattatgtatagaattagatcctggaatggcttttggtactggagatcatccaacaacaagtatgtgtctaaaagcgattgaaacttatgtaacacccgattcctcagtcattgatgtaggtacaggttctggtatattaagtatcgctagtcacttaataggtgttaaacgaattaaagccttagatatagacgaaatggctgttggtgtggctaaggagaattttagaaaaaatcattgtgaaaatgatattgaagccattcccggtaatctattaaaagaagaaaatgaaaaatttgatgtagttatcgcaaatattttagctcatattattgatgaaatgattgaagatgcttataatacactaaatgaagatggttattttataacttcaggtattatagaagaaaagcatgaagatatactgtcgcatatgaagcgtgttggatttaatattgtatcaatcaatcatgacaatggatgggtttgcattgttggtcagaaagcgagtgaataatttgcaacgatactttatcaatcaaaacgctgattctcatcagcgtttttttattaccaatgaagaagatatacatcatatcaaaaatgtaatgagaaataccgttggtaacaaaattataattaattttaatgataaaaaagtatttattagtgaaatcacaaatataaagtctaatcaaattgaagttttaccaataaaccaattagatattgacactgaattaccagttgatgtaacgatttgtagtggtttaataaaagctgataaatatgaatggttgcttcaaaaaagtacagaattaggtgccaatcattttatttcagtgggtatggatcgatctgtagttaaattacaagagaacaaggtacaaaagaaaatagatagatggcaaaagattgtaaaagaagctgctgaacaaagttatagacttgttattccagatgttaaatttcagtcgaatttaaaagtaatttatgataccataaataattatgactatgtgttaatagcatatgaagacgaagccaagcatggcgaaaaaagtcgatttaaaaatattttaaacaactttcaaacgaatgatcgtgtgttaatcatatttggacctgaaggtggtttttctgataaggaaatcgatctctttagggaggtaagcttaaacgttggtttaggtcctagaatattaagagcagaaactgcgccactatatgcacttagtgctataagttttgagaaagaattgatggggtgaattaaatggcaacagtagcgtttcatactttaggttgtaaagtaaaccattatgaaactgaagcaatatggcaattatttaaagatgctaattatgaaagagtagattttgaaactaatgcagatgtatatgtcattaatacttgcaccgtgactaacacaggtgataaaaaaagtagacaagtcattagaagagcaatacgtcgtaatccggatgcagtagtatgtgttacaggttgttatgcacaaacatcttctgctgaaattatggagattccaggtgtagatgtcgttgttggtactcaagacagacataaattacttagttatattgatcaatttagagaagaacgtcaaccaattaatggtgttggaaatattatgaaaaatcgtacatatgaagaacttgatgtgccttattttacggatagaactcgtgcatctctaaaaatccaagaaggttgtaataatttttgtacgttctgtattattccatgggcacgtggtttaatgcgctctagagatcctgaaaaagtagttgaacaagcaacacaattagttcaatctggatataaagaaattgtattaactggtattcataccggtggatacggtcaagatttaaaaaattataatttagctcaattactcagagatcttgaggaaattgatggtttagaaagaattcgaatttcttcaattgaagccagtcaacttactgatgaagtcattgacgttctaaaaaattctaataaagtagttagacatttacatgtaccattacaatcaggttcagatacagtattaaaacgtatgcgtcgcaaatatactatggaacatttttctgaaagactaacaaaattacatgatgcattacctgatttagcagttacaagtgatgttatagtaggtttcccaggagaaactgaagaagaattccaagaaacatatgattttatagttaaacataaattctcagagttacatgttttcccgtattcacaacgtattggtacacctgctgcacgtatgggtgatcaaattgatgagtcaattaaaaatgaacgtgtgcataaacttattgctttaagtgatcaacttgctaaagaatacgcatcaaaatttgaaaatgaagttttagaagtgattccagaagaagtaggggaaacaaaaaatacattagtaggttacgcagataattatatgaaagttgaatttgagggtagtgaggatttaatcggtgagattgttaaagttaaaattaataaagctgattatccaattaacattggtagtgcagttagaatcgttaatcatgctactaataaaactgaagaaggcatattattataaatttttgaaattataaagatttataattgaccataattatttcatatattatactaattaaagcatagttaattatttctatgcaattattgactttaagtttcgttgatatttggagggagggaaatacagatgtctaaaacagtagtacgtaaaaatgaatcactagaagatgcattacgtagatttaaacgttcagtatctaaaagtggtacaatccaagaagtacgtaaacgtgaattttacgaaaaaccaagtgtaagacgtaagaaaaaatcagaagctgcacgtaaacgtaaattcaaataattaatagctctgttgactccctcaacatgaatgttaattatatatatcctctcaattagttaaactaattgagagtttttttatataattgtaatactataatatagtatttatttcatgtataatttaattgagagcgaggtgagataatgataagtataagtttgatacatatcgagaatacttttgcttcattgaatcattcatggttgaatcatatgtcaaatatcattgttaatcctattgttttattaattcttacatgtattatctttttaggttttttatatcaactttattctaaaaggataaatattttaggtattttagcttctctagcgttacttattctatttctaggatttttaattagtggcgatgtcaatttgatttcgattttattgtttttcataggtatcatcttactaataatagaactattcgttgttggagcagtcattggaattataggaatagtgcttattattgttagtatgattatgttaggagataatattttagttatgctctttaatgttattgtcgctttaatattttctattatagaatgggtgattttggtgaaagtatttaatcgcaaaataccattttttgataaagtggtattgaatgattcaacgagtacagaagctggttatagatctcatgatgatcgttcttacttagtgggaaaaactgcgtatactactactgatttaagacctgctggaatcataactttagatgacaaaagaattgatgctgtttctgacggtacatttatcctgagaaataaaaaagtaaaaattttagaggtagaaggtagtagagtagttgtaagagaaataaaaatataaaaggagtaaaatcaatgttaaatattggaattataattattgcgattattataatagttgcgttattgttattattttcatttgtaccagtcggattatggatttccgctattgctgcaggtgtaaaagttagtattgctacacttgtaggaatgcgacttcgtagagtatctcctcgtaaagtgataggtcctcttattaaagctcataaagcaggattaaatttaacaacaaatcaattggaatctcattatctagctggtggtaatgtagatagagtagtggatgccaacatagcagctcaacgtgcagatatcaatttaccttttgaaagaggtgccgcaatagacttagcgggacgagatgtcttagaagctgttcaaatgtctgttaatcccaaagtaatcgaaactccctttattacgggtgttgcgatgaacggtatcgaagttaaagctaaagctagaattacagtaagagctaatatttctagacttgtaggtggttctggagaagaaacaattattgcacgagttggtgaaggtattgtttccacaattggttctagtgaacatcatacacaagtacttgaaaatcctgataatatttctaaaacagtattaagtaaaggattggattcaggaacagcatttgaaattttatcgattgatattgcagatgtagacatcggtaaaaatatcggcgctgatttacaaacggaacaagcactcgcagataaaaatattgctcaagctaaagctgaggaacgacgtgctatggctgttgcctctgaacaagaaatgaaagcacgtgttcaagaaatgcgtgctaaggtagtagaagctgaatcagaagtaccactagcaatggctgaagctttacgtaaaggtaatatcggagtaaaagattactataatttaaaaaatgtagaagcagatacaggtatgagaaacgctattaataaacgtaccgaacaaaatgacgatgaatcaccaaattaaatagaggggtgattaaatgaatattggaattcttatattcgttatttctgtgattgttactggtattagtgcaatgagagataaaagtcatgaacaacgaaaaaatcaaatgcctccacacaaaaatacacaaagtcctacgcaaaacacaccaagaaaaaaaggtatttttgaacagatagaagaagcttttaatgagatggcatcagaatttgatgaagaagaacaaactaaaaaaacatcatcaccaaaaccatcttctaaaaaagaaacggttcacagtgataaaaatctaaaaaaaaatgttacgcctgaacatcatcgtggagaatcaaaacggtttgaaactaaacaatctcacaccggaaaagtgccttctaaagatagatattcaacttcacgagagagatctcaaagtgaaaaaaatattaaaaaacagttagaagactcgctatcaaaagaattatttaatgtgaggtctgaaattgacagggaaaaagaaaaacaactttctttaattgaaaagaaagctaaagaaattattaatgataagtatttatctgaaaaaacgaaacgttataaactgaatcaactactcaatagtaaatctattgagaaaaatatgacacatcaaacgtttcaatttgataatgatccaatagttgatggaattatttggcaagaaatattaaataaacctaaaaaattataagaggttataaataaaaaaataagacaagattcattgtttcattctgacctctataagagactttctacgtgaaagtctctttatttatgttcctaataagttaagacgcccctaaaactcatagtgttcttggtacttttttgttatgctatattatcttaggttaattattcattcaaaacatttaaatttgtatactttatcattgtttagtaaaatttatatgaaagattaattattaatgaatatgttttatgtgaaaaggagcgcttttatgccaggaataattcaaatagataacatcaatcattctcaagctttaattggtaataatgatgaacacttaaagtcgattgaagaagcatttgatgttatcatacatgctcgcgggcaagaaattgcagtaaaaggtcaagtattagagcatgttgaaaaagcagaattagttcttaaaaatttattaaaggtaattgagttaggacattcaattacattaaaggatgttgaggctgccataaagatggctaaaaatgatactattcaatatctattggatttatatgatgaagagattactaaagatgcctttggtaaaacaattcgtgcaaaaacaatggggcaacgtctttatattaatgctatgaaacgtaatgatttggtatttggtataggtcctgctggaacaggtaaaactttccttgcagttgtttatgctgcaaaacaattaagaaaaggaactgtaaaaagaattgttttaacaagaccagctgtagaagctggtgaatcattaggtttcttaccaggagacttaaaagaaaaagttgatccatatttaagacctctttatgatggtttaaatactgtcctaggtagagaacaaacagcacgatttattgaacgaggtacaattgaaattgctcctttagcgtatatgaggggtagaactctagatgatgcatttgtcattttagatgaagctcaaaatacaacacatgcacaaatgaaaatgtttttaactcgtctaggatttggttcaaaaatggttgtaactggagaccaaactcaaattgacttaccaaaaggtgttaaaagtggattaaaagaagctattaagaaccttcgtggtgttaaaggaataaatattatggaactagatcaaagcgatgtagtacgacacccattagtaagtaaaattatcgaacgttatgaaggagacaattaaatgtttacgattgatttcaatgatcatacaaacttagttaaaggtgaatggtatcatcaaattgaagacttaattaactttgctaaagaaaaagaaaacattcatgaagatgctgaattgtcagttacttttgtagataaagatgaaattcaagaaataaataaaaattatcgagataaagataaagtgactgatgttatttcttttgcacttgaagaagatgaaccagatattattggtttagatattcctagagtattaggagatattattatttgtactgatgtagctaaggaacaagctgaatcttataatcattcatttgaaagagaacttggttttttagctttacatggttttttacacttattaggttatgatcatatgaatgaagaagatgaaaaagaaatgtttggacgtcaaaaagaaattttaaatgcatacggattgactagagattaaatttttaaaacgatttaaatacacctttgatggtttaaaaacacttcttcaaaaagatcacaattatctaatacacttaatcttcgcattcatagctatcattttaggaattatcgtaagactttcaactgtagaatggttgtttgttttattaagcatcactttggtacttacgcttgaagctgtgaatacggctatagaatgcgtcgtagatttagttacttctgactatcatgaattagctaaacaagctaaagatattgccgcctttagtgttatggttgtttcaatctttgcactaattataggtttaattatttttatacctcacatctttttttaaggggacaataaaatgagttatcaatcacattattttcaagaagttagaaaagctcaacaacgtgcttatgtaccgtatagtcattttaaagtaggtgcatatttaaaaacaaaagacggtcgtcatttttatggagcaaatgttgaaaatgcagcttatccagcaacgatttgcgcagaacgatctagtttagtagctgcaatttcagaaggctatcgaccaggagattttgaatcaataacagttaccgttgacgctgaacatccgtcatcaccttgtggaacatgtcgtcaagtattaaaagaactctgtgatgacgacatgcctgtgtatatgacaaatcataaaggtgagatgattaaatcaactgtagtagaactattacctcacggcttttcaggaaaggatttagaataaatgacagaacacaaatcaggatttgtatctattatagggagaccgaatgtgggaaaatccacatttatgaatagagtcattggacataaaattgcaattatgtcagataaagctcaaacaacaagaaataaaattcagggagtaatgacaagagaagatgctcaaatcattttcttagatacaccaggcattcataaacctaagcataaattaggagattatatgatgcgtgtagctaaaaatacgctatcagaaatcgatgctattatgtttatggtaaatgtaaatgaagatattggtcgtggtgatgaatatataatggaaatgctgaaaaatgttaaaacaccggtatttctagtgttaaataaaattgatttagttcatccagatgcacttatgcctaagattgaaaaatataaaacctatatggattttactgaaatcgtgccaatttcggcacttgagggattgaatgtggatcattttatcgatgtacttaaagattatttacctgaaggtccaaaatattaccctgatgatcaaatatcggatcatccagaacaatttgtagtaggcgagattattagagaaaaaatcttacatttaacaagtgaagaaatcccacatgcaataggggtaaatgtagacagaatgattaaggaaagtgaagaaagagtaagaattgaagcaactatttttgttgaacgtgattctcaaaaaggaattgttataggtaagggtgggaaaaaacttaaagaagttggtaaaagagctcgacgcgatattgaaatgcttctcggatcaaaagtttaccttgaattatgggtaaaagttcagaaagattggagaaataaagtaaactttattcgtcaaatgggatatgttgaagatcaagattaacgtttaaattaataggaaagccggtgagatgcattgttagaaaaacaaaaaggaattatcataaaatcagtagattatggtgaatccgataaaattattacaatattaaacgagcatggtgctaaaattcctattatggtaagacgtgctaagaaatctaaaaccggcttgcaagctcatacacaactctttgtgtatggcttatttatttataataaatggaaaggtatggggacgctcagttctattgatgtcataaaccaatattatcaattacgattagatatttttgatagtagttatgcgactttatgtgtcgaagcaatagatcgatcattagaaccagatgaagtttctctatatcattataagttattagaatttgtactcaataaaatttcagaaggtaattctgctcaattaatgtcgattatcgtattattgaaatgtatgaataaatttggttttggcgcatttttcaattattgtgcaattactggtgatactgatcaatctaagcttattgcttacagttttaaatatgacgggacaatctcagaaactgtattaaataatgatccttatgcattaaagctatccaataaaacattttatttattggatattttacaaaagttgccaattgataaaatgaatcattttaatattaaccaaactttattagatgaaatgtcagaattaatgataatgctgtataaagaatatgctggcatgtactttaaaggtcaaaaattaattaatcaacttaagcgattagaataatatacaatgtttaaattaattaaagaacccacttattactcatagcaagtaataagtgggttcttgttatattaaaacttaactttttcagctaagaatgtttctaattctgagattggcatacgaacttgttccatagaatctctatcacgtactgtaacttgattatcttctaatgaatcgaaatcaaatgtaatacagtaaggagtaccgatctcatcttgacgacgataacgcttaccaattgattgtgattcatcaaaatcaacagaaaacttagaacttaattgttcaaagattttaattgcttcttcagataattttttacttaatggtaaaatagcagctttatatggtgctaaagcagggtggaaatgcattactgtacgagcatctttactaccttcaacgccttcttcatcataagcatcacataagaaagctaatgtaacacgatctgcccctaaagaaggttcaatacaatatggaatatatttctcatttgtttctggatcatgatatctgaaatcctcgccagaatgttcactgtgctttttcaagtcaaaatcagtacggcttgcaataccccataattcgccccaaccaaatgggaatttatattcaatatctgtagtcgcattagaatagtgagataattcttcttcatcatggtcacgtaatctcatattttcttcattgatgtttaaatcttttaaccattgacttgcaaatgttttccagtaattttgccattcaatttcttcaccaggtttacagaagaattctaattccatttgttcaaattctcttgttctaaaaataaagttaccaggcgtgatttcattacggaatgatttaccgatttgaccaataccgaatggtaattttttacgcattgaacgttgaacgtttttatagtttacgaaaataccttgagcagtttctggacgtaaaaatagttcattagtagagccctcagtaacaccttggaatgttttaaacattaagttaaattgacgaatatctgtccaattagtagtaccacttactggacatacaataccttcatcatcgatgatgcgtttcatttcttcaaaacttaagccatcagcaatgaaattttcatcacctttttcattttgcatatagtcttcgattaatttatctgcacgatagcgaattttactatctttattatcaatcattgggtcattaaaattacctaaatgaccagatgcttcccaagtttttggattcattaaaattgcagcatcaatcccaacattgtatggtgattgagtaatgaatttttgccaccatgcttttttaatattattttttaattcaacacctaatggaccataatcccatgtattagataaaccaccgtaaatatcactacctgggaatacaaatcctctatgtttagctagtgatacaatagtatccatatctttaaccatattatctctccttttaaaataaaaacgtcccaagacaataaataaatataaaacaatacttattattatcttgggacgagttaataattcatctatataaatatatagtgttaacaaaataacccgcggttccacccaaattagtgtagacactcgcttttatgtaatgatattgataagccaatttttaaaatgttaagcttccaccaaccttaactcgcttaatcatattttaattcatagaaaatttaatagcaaggatttatatgtatttgtaggtatatatataaataggtataataaaacatgaaattaaaaggggtgaagacctatagaattaagtaaaagacaagaacaaataattgaaatagttaaggatggtggcccgataacaggtgaacatatagcagataagcttaatttaactcgtgctactttacgtcctgatttagctattttaactatgtctggttttattgaagctagaccacgtgtgggttattattattcaggtaaatccaagaataaattaatcagtgatcatttacgtcaatatataataaaagatcatatgtctctacctgttatcgttaaagaagatacgacaatttatgatgctatatgtactatatttttagaagatacaggaacattatttattactaatcaaaaagatgaattgattggtgtgagctcgcgaaaagatttgttacgtgcctctatgattggtcaagatattcatactatgcctataagtatcatcatgtcacgtatgcctaatattgtttatttaaaagaagaagacctcgtcatctatgctgcaagtcaaatgatagataaggaaattgattcaattcccgtcgttagaaaaaaagaaaatagtaaatataaagttgtaggtagaatatctaaaacaacaataacaaaattatttgtttcattatttaaagaataggtgataaacaatggaaaatataaagataatcattgcatctgattcaataggagatacagctgagttggttgctagtgcttgcgtcgctcaatttaatcctaaagcttgtaaacatggttttttgagatatccttatatagaaacctttaaggatatagatgaagttatacaggtcgctatagataaaaatgcaattattgtatatacgttagtagaaccagaaattaaagcatatatgaagaaaaaagtagacgatttctctttaaaagctgttgatataatgggtcctctaatgacactacttaatcaaacgcatgatgaggagccgtataatcagccaggcagagttcataaattagacgatgcctatttcaaaaaaatagatgcaatcgaatttgcggtaaaatacgatgatggtaaagatgcgaaaggattacctaaggcagatattgttttaattggcatttcaagaacttctaagacgcctctatctcagtatttagcgcacaaaagctataaagtaatgaacattcctctagttccagaggtaacgccaccagacgaattatttaaaattaatccaactaaatgtatagcattaaagattagtgaagataaacttaatttaataagaaaacaacgacttaaacaattaggattaggtgaacatgctagatatgcgactgaagatagaattaaagaagaaattcaatattttgaaaaaattgtcgaaaaaataggatgccctgttattgatgtatctgataaggctattgaagaaacagcaaatgatgttatacaaattattgaaagtaaagcataaatatttaaaaaccttttataaaagtgtataatattatgactactatttaataggtgatatatattgcgtatagaacagtctgtaattaacgaaataaaggaaaaaacagatattttagatttagtaagtgaatatgtgaaattagaaaaaagaggacgcaattacattggtttgtgtccttttcatgatgaaaaaacaccttcttttacagtttctgaagataaacaaatatgccattgctttggttgtaaaaaaggtggaaatgtttttcaatttattcaagacattaaggacatttcattcgtagaagcagtacaagaacttggagaacgcgttaatataaaagtagatattggtcattctaatccctctacaactcaaatagcatctgaagacttaaaaatgattgaaatgcatgaattaattaatgaatattatatgtatgcattaatgaaatcagtagaaggtgaagaagctttaaattatctcgtaaatcgtggtttcactgaagaattaataaaatctcgtggaatagggtatgcccctaataacgctcacttttgtcatgactttttaaaacaaaaaggatatgacatagaactagcttatgaagctggtttgttatcacgtaacgaagaaaattttagttactacgatcgttttagagatcgcatcatgtttcctttaaaaaatgctcaaggaagaattgtcggtttttctggtagaacttataacaatcaagaacctaagtatttaaatagtcctgagacaccgatttttcaaaaaagacgattactttataatcttgataacgcaagaaaatcaattagaaaaaatgatgaagtaatgttgttagaaggatttatggatgtaattaaagctgattacgctggattaaaaacagtggtagcaagtatgggtacagcattatcagaagatcacatgacagttttaaaaaaattaacctctaatataactttaatgtttgatggagactttgctggtcaagaggccactttaaaaactggagaacatttactgaaacatggattaaatgtatttgtagtacaattaccaaaaaacatggatcccgatgaatatatagttaaattcggtaaagaaaaatttatagaatttttaaataatgagaagaaatcgtttattatttacaaagttcaattctatcgagaagaaattgaaaataatgatctagcttatgagcgtcactttaaagagattactgaagatatttcatttgtcagatcttcaatattaaaaaataaaattgtgaatgacgtagctgacattttcaatattgatgccaatactattatgtccaatgtacatcaacaacctgaatttatctcatatgaagaagactatattggaaataccaatgataactcgaattcaaatactcaaaatttaaacatcgtttttacacatttaaacaaaagtgaaaaagcacaaagagctttattaaaacattttatgatggataaagatgtatttctaaattataaccgacaacttgaagcaaatgattttacgaataaatattttcaaagtatttttaaagcgctaaccgattattattctgaaaatgattactattcgataagtgatttaatattatacattgaagataaagatattagagaagcaattatacagcttgatgattatgaattaaatcgagaaccttatgatttagaaattgaagaatatatctcaaccttaaatgaaaacaaatatgaagattctattgaagaacttaatcataaattaaaagaagcacttagaattggtgacgtagaatctcaaaaatattatttacaaatgatagttgataaaaataagcaacgcatgtagatgaacatttatatttaataaccattactgtataatggttattatgcttttttaaagggtagacaaatagtaagttaaatatttatgaaataaggatatcatttttattacctatagaatgataatatttcatgtttattataaaatatacttttcttattataataatttattatataattaaatatcttaattgaaagcttaaaatacgattgggaggccttttcatgtctgataaccaagttaaaatcaaaaaacaaacaattgatccgactttaacattagaagatgttaaaaaacaattaattgaaaaaggtaaaaaggaaggtcatctaagtcatgaagaaattgctgaaaagctgcaaaattttgacatggattccgaccaaatggatgatttctttgaccaactaaatgataacgatattagtttagtaaatgaaaaagatagttcagatacagatgaaaaattaaatccaaatgacttaagtgcgcctccaggtgttaaaattaatgatcctgtaagaatgtacttaaaagaaattggacgtgtaaatcttcttagtgcacaagaagaaattgaattagctaaacgtattgaacaaggtgatgaagtagcaaaatctcgccttgcagaagccaacttgcgattagttgtaagtattgcaaaacggtatgttggtcgtggtatgcttttcttagacttaatccaagaggggaatatgggtcttatcaaagcagtagaaaagttcgattttagtaaaggatttaaattttctacttatgctacgtggtggattagacaagccattacacgtgctattgctgaccaagctcgtaccatccgtattcctgtgcatatggttgaaactattaataagcttattcgcgtacaaagacaattattacaagacttaggtcgtgatcctgctcctgaagaaattggtgaagaaatggatttaccacctgaaaaagttcgcgaaatacttaaaatagctcaagagccagtatccttagaaacgccaataggtgaagaagatgacagtcacttaggagactttattgaagatcaagaagcacaaagcccttctgaccatgctgcttatgagttattgaaagaacaattagaagacgttttagatacacttactgatagagaagaaaatgttttacgtttaagatttggccttgatgacggacgaactagaacattagaagaagtgggtaaagtgttcggtgttacaagagaacgtattcgtcaaatcgaagctaaagcgcttagaaaattaagacatccaagtcgtagcaagcgtcttaaagattttatggactaagattaatggtgaatctgagttaacgatagatgttatgtataaagaaacttgaggctaagacaatactatgtcctagcctctttttataataaaggagataacaatgatatcattaaatcatcgattaaaagttgtaagccaatacttattaagtaattcattagctgatatcggttctgatcacgcttatttacctatttatgcattacaacgtcatctatgcgatgatgctattgctggcgaagtaatcaaaggaccttatacagctgctaaaaagaatgtagcacagcatcaacttactcaacatatcgatgttcgattaggtgatggtcttagtatactaactgagaaagataaagtagataatatcacaatttgtggaatgggcggacctttaatagcgaaaatattagatgaaggtaaagataaacttgcacatcatccacgtctaattttgcaaagtaatattcaaactgaaaccttacgcaagacacttcaacatcttaattatgatattatcgctgaagaaattttagaagaaaaaggacatatctatgaaattgtagttagtgaatggaaagaaaatcttaatcttcttaataaaaaatcacttaaatttggtcctattcttttaaataataaaaacggtatttttataaaaaagtgggaaagagagttagcagctttagagcatattcgtaatcaattgaatccaatacaacatcgtgagagactagaagagattgaagaagagatatcaatgataagagaggtactctataatgaaaattaaagaactaatgtcaattattgaccaacacgttccccttaaaactgctgaaagctgggataatgtgggtttattaattggagatgacactaaagagataacaggtattttgacagcattagattgcacaatggaagtaatagaagaggcaattagcaaaggatacaatacaattattgcccatcaccctttaatttttaaaggtattaaatcattagttaatgatggatatggtaaattaatacacatgcttattcaaaatgatattcaacttattgctttgcacaccaatttagataatcacattgatggtgtcaatgagatgctagcaaaaaaattaaatttaactaatattagatttttaaatgaagaagaatcattttactataaagtacaaacttacattcccgaagaaaatctagaatcatttaaatatcatattaataatattggtttagcaaaagaagggaattatgaatattgtttctttgagtccaaaggtaaaggtcaattcaaaccagttggagaggctcgccctcatattggagaactaaatcgaattgaatatgtaaatgaagtgaagctagaatttatgattcgtaaagatcaattaaatattgctaaaaatgcaattattaattaccatccttatgaaacacctgtatatgattttattaagatgacgacatctgctaattatggtcttggaaaaataggcgaactaaatgagccgttaaatttagaacattttgctaaatatgctaaagcacatttaaatattcctagcgttcgttatacaggtccttcagaagcgttaattaaaacagttgctattatcggaggtgctggtatcggttttgaaactagtgcttttaaaaagggagcagatgttttcgttactggagacataaaacatcatgatgcacttgatgctaaaactaatggcattcatttattagatatcaatcattatagtgagtacgttatgaaagaaggacttaaaggcttactaggacaatggttatttagtaatgagagtaagcagcttaatatagaagcttcagaaataaatacagatccatttaattatatttaaaactatacaaaggaggtcagatgaatggctaatcatccatttgaaatatttaatttaaatacaaatcttattgatgcagttaaagatttaaattttaataaacctactgaaattcaaaatagaattattccacgtataaaaaaaggaaccaatttaattggtcaatcacaaaccggtactggcaaatcacacgcctttttattacctttaatagatttaattaatactgacattaaagaacctcaaagtattgttgttgcaccaactcgtgaattaacacaacaattgtataaagtggctagtcatctagctagttttcaatcagatattaaagtaagtttatttattggtggtactgacatagagaaagataaacaacgaacaaatcaacaacctcaattagtgattggtacaccaacacgaatcaatgatttagctcagagtggacatttgcatattcataaggcatcatatttaattatcgatgaagcagatttactcattgatttaggcttaatagaagatgttgattatattgctgctcgtttagatgaaaatgctaatattgcagtctttagtgcaacaattccaaaatcattagaaccgtttttaaataagtatcttagtcaccctgaatatgttgtagttgataacaaatcccaaaataaaaaaaatattgaattttatttgattcctactaaaggaactgaaaaagttgataaaactttgcaattaattgatatactaaatccatatctatgtattattttttgtaacagtagagaaaatgcaaatgaacttgctcaatctcttaatgagtctggcattaaagttggtatgattcatggcggtttaacaccaagagaacgtaaacaacaaatgaaacgtattcggaatttagatttccaatatgttattgcaagtgatttagcttcaagaggaattgatattgaaggcgttagtcatgtagtgaattttgatgttcctaatgatattgatttctttactcatagagtgggtagaacaggacgtggaaattataaaggcgtggctctaacattatatagcccagatgaagaacataatatttcttttattgaagataaaggctaccactttgataatgttgatattaaaaatggagaacttaaaccaatcaaagcgcacaatacacgtcataaacgcgaacgtaaagatgatcatttaacaaatcaagtaaaacataaagtaagaagtaaatctaaaaataaagttaaaccaggttataaaaagaaatttaaacaagaagtagaaagaatgaaacgacaagaaagaaagcaatacagtaaacaacgtagtagacaacaacgaaaaaacaataaaaaaggttaggtgaaacaaatgttaattggctcacatgtatcaatgagtggtaaaaaaatgttagaaggatcggccgaagaagcacatcaatttggtgaatcaacatttatgatttatacaggtgcacctcaaaatacaagaagaaaaagtataaacgatttaaatattgaaaaagggcataaagttatggaacaatatggtttatcaaatattgttgtacacgctccttacataataaacataggaaatacaacgaaacctgaagtttatgaattaggtgttaatttccttcaaaatgagattgaacgtacgcaagctttaggagcgaaagatattgtcttacatccaggtgcacatgtaggtgctggtgcagataaaggaattaatcagattattaaaggattaaatgaagtgttaacacatgatcatgatgtacgaattgcacttgaaacaatggctggaaaaggaacagaaattggacgtagttttgaagaacttgctcgcattattgatggtgtgacacataacgatcggttatctatttgcttcgatacctgtcatacacatgatgctggttataatatcaaaaatgattttgatggcgttttgaatgagtttgataaaattattggaatagaccgtattaaagttgttcatgtaaatgatagtaaaaatgaacaaggtgcacataaagaccgacatgaaaatattggatttggatatattggttttgatgccttgaataatgtggtacatcatgaagcttttaaagacattcctaaaatccttgaaactccttatgtaggagaagataagaaaaataaaaagccgccttatcgctttgaaattgaaatgttaaaatctcaaatttttgatcctaaattaaaagaaaaaatattgaatcaataattaaaataagagtaagatagcataatctacaaagagactatcttactcttattttaattcgtaaacattactatttacaaaaaacatatataattgtatagtatttagcgaggtgaaaagatgaatcaacctgtttttgaattaaaaaatattgattattattttgataataaacaagtattagaaaacattaatatccgaattaatagaggtgactttcttgcaattgttggtcctaatggagcaggaaaatctactcttttaaaggttattcttggcttattaccattacaacgcggtgaaatatacattgacgggaaatcttataaaaaaaatactcaatctgcattaaaaattagttatgtgtctcaaaaagccaatgcttttactgcaggatttcctgctagtgtgaaagaagttgttttaagtggtttaactaaaacgaaaagaatttttcagtggtttaataaaaatgatgaacaacaagtagataatgtcttacatcgtttaaatattcatcatctaaagaataaaaatattgcagaattatcaggtggacaacaacaacgtgtactaattgcacgcgctttaatttcaaatccatctgtcttagtattagacgaaccgacaaatgggattgatgcaaaacatgtgaatgaattttatgccaccttgcaacatttaaaagaagaaggtataacgattattttagttactcatgatataggcgttgtggtagacacagctacaaaagtcgcttgcttaaataaacatcttcatttccacggttctactgaagaatttaagtctcttgatgaagttgaaatttcaaaaatatatggtcatccaattaaatttgttgatcatcaacataatcgttcatgctgtgaaacataattttaaataggagttaattatgataagtatatggattaaattaagaggtgaatatcatgattgaagcattgttaaactttgattttatgagatattcacttttaagtgggatattgattggttttattgcacctttaattggtgcatttatagtggtaaggcgattatcattaattgctgatgctttaagtcacgtcacactaggcggtatttcgtttggaatgtttattattaccttatcaccagtattagtatttataaaccctatgtggtttggtataatctttgcaatagttggagctttacttatagaaaaattaagaacttcgtattcaaactatcaagaaattgcaattccaattataatgagtgctggaattgcattaagcgcaatttttatttctctagctgatgggttcaatcaagaaattgttggattattattcggatcaattagtgctgtaaatttaagtgacttagtcacaattacgatcatttcaatcgtcgtattattattcattcttttattatacaaagaattatttattttatcttttgatgaggaatatagtaaggttattaatattccaaaatggattcagtttttatttataaccattgttgctatggttatttctgcatcaatgagagtagtaggaattttacttgtgagtgcattaattacattacctgtggctatagcaatgcgattaactaaaggatttaaacagttgattatcttaagtattattataggtgaatgttctgtcattctaggacttaccttagcattttatattaatatatctcctggtggtgtcatcgtggtattattagttctaattttaggaataacgatgttactacagaaaactaaacgaactgccaaaaaggagcattaaattatgaatacaaacgacgctattaaaattttaaaagacaatgggttaaaatatactaagaaaagagaagatatgattaatatctttgttaatgaagataaatatattaatgctaaatatatacaacaacaattagacaatgattatccaggtatatcttttgatactatttatcgtaatcttcatctttttaaagatttaaatattgttgaaagtacagaattagatggagaaatgaaatttagaatcgcttgtactaatcaccatcatcatcattttatatgtgaaaattgtggagatacaaaagtaatagatttttgtccaattgagcaagttaagcaatttctacctaatgtagatattcatactcataaattagaagtatatggtatatgtgaaacttgccatgataaaggtataaattaaaatgagatatgttctgagacgtaaataagcgtctcagtttttttataggtcaaaagtctgaatttttactaatattgaaatataatgtttaaaaactactaaaatgagatataaaaagagtataataagaaatatgacaactatgtgaataatatttaaagcaaatgatttgttgtacatcatatagcttgttatgatttatgtgaagataatttaggaggatgattatttatggcttttgaattaccaaatttaccatatgcagcagatgcattagaaccacatatcgacaaagaaacaatggaaattcatcatgacaaacatcataacacttatgttacaaaattaaactctgcagttgaaggtactgatttagaatctaaatcaattgaagaaattgttgcaaatttagatagtgtacctgaaaatattcaaacagcagtacgtaataatggtggaggtcatttaaatcactcattattctgggaattattaactcctaattctgaagaaaaaggtactgtagttgataaaattaaagaacaatggggttctttagatgagtttaaaaaagaattcgctgataaagctgcagcacgttttggttcaggttgggcttggttagtagtaaataatggaaaattagaaattgttactactccaaatcaagataaccctattactgaaggaaaaactccaattttaggcttagatgtttgggaacatgcttattatcttaaatatcaaaataaacgtccagattatatcagtgctttctggaatgttgtaaattgggaaaaagtagacgagttatacaatgctgctacaaaataataaataaaaaaagtatttattagtgatctctttttaggagatcactttttttatgaaaaatatagaaaaattatacaatttcatatatcatttataagtatacatgattaataattgaggtcggttgtcttgcttaaaagattaaaagaaaaatcaaatgatgaaaaaataaaacatacgatgaataaacgaattcgttttatatttggtgcaattgttttgattttcgtattaattgtcctaagactaggatatttacaaattgcacaaggtgcacattatagtcaattagtgaaaaatgatgagaatattactgtcaatgagtccgtaccacgaggaagaatactagatagaaatggcaagattttagttgataatgcttcgaaattagcaattacctacacgcgttctagaaaaacaagtcaacaagacatgttaaataccgctaaaaaattagctaaactcattacaatgaatactgataagattacaaagcaagataaacaagacttttggatacaaaatcatccaaaagaagttaataaattaatgaaaaaagaaacaactatgcttaacaatggtagcataagtcaagaacagtatgataaacaattacatagtaaaattaaaaatactcaattaaatagtttatctaagcatgatttacaagtgttagctatatatagagaaatgtcatctggatctacacttgatccgcaaatgataaaaaatgaagatgttagtgaaaaggaatatgctgctgtttctcaacaattggataatttacctggtgtcaatacttcaatggactgggatcgaaaatatccatatggtgaaactttaagaagtatatttggtagtgtttctacaccttctgagggtattcctaaagaattaactgaacagtatttagcaaaaggatattctagaaatgacagggtagggaaagcttatctagagtatcaatatgaagacattctacgtggtaaaaagaaacagctgaaatacactactgataaatctggtaaagttattagttctaaagtgattaaccctgggtcacgtggaaatgatttacaactaacaattgacattgatttacagaaaaaagttgagtctctgttagaaaacgaaataaaaacactgcgtagtcaaggagcaaccaacatggacaatgcgcttgtagttgttcaaaatcctaaaaatggtgatattcttgcaatggctggaagacaaattgataaaaatggtgaactgctagattatgatttaggtaactttactggccaatttgcagtcggttcttctgttaaaggagcaaccttattaactggttatcaaaatcatactatcaaagtcggtgaagaaatgattgatgaacctttacactttagaggcggactaactaaacgttcttactttaaccaaaatggcaaagtcctaattaacgacaaagaagcattaatgcattcttcaaacgtatatatgtttaaaactgctttaagactagctggtgatccttactcaagtggtatgagtttacctaataatattgaagaagctggtcaaaaactaagaaaaggtctaaatcaagtaggattaggtgttaaaacaggtatcgatttacctaatgaaacaattggtcaaattgaaccattaactaataatccaggcaattatttagatttatcaataggtcagtatgatacttatacacctattcaactttcacaatatatatctacaattgcaaataatggttacagagtacaaccgcacattggtttagctatacatgacgcaacaaatagtgatcaagtaggaccggtaaaagataaaattaaaggtaatatactaaataaagttaataattctcaagatgagatagatgaagtaaaacaaggattcaagatggctttcaatgaaaaagatggtacaggctatgcaagcttccataaaactgttgttccatcagctggtaaaactggtactgctgaagtttatcaaaatggacaatctagagttaactcaacatatataggttatgcgcctattaaagatcctaaattagctttttctatcgtatatactaatcaacctgttccaccaccatggttaaatgggggagatttaggaagagatatcattaattactactttaaaaatgaaaaataattttaataaccgttgataagatgcttttctacttaatactagtaaaaattaatacttttcaattaatcgtctaagtggtatgataataaagtcgtatttagaaaaggtaaggaggtataatcatgcgcgtaaacgtaacattagcttgtactgaatgtggtgacagaaactacattactactaaaaataaaagaaacaatcctgaacgtattgaaatgaaaaaatattgttcacgtgataacaaacaaactctacatcgtgaaactaaataatattaaaagtaaaaaaggttggaacaaaattgttccaaccttttttactttagtagatcattcaaccattaatcatcttaaatatataattagcaattatatttattttatatagattaatatattttttaacttaaaataatttgaattatcataaatgacatcactatataataacgttataatatattaaaggatgggagaaagaatgggtaaaaagcaaattagaaaaaatattttatcacaaatgaaagactttgataaaaaaaataagcgtaaagctgatatttggttaatgaaacaattaattgaaaatgaaaaatttaaaaaagcacatcgtatcggtatatttttgtctatgccacacgagattaatacatacaatattattactttcgctttagataatggaaaacaaatttttgtgcccgatacagattacagaagtcgtaatatgaattttaaacaactattagatttgtcatcaatagctaccgatgataaaggtattaattatgttaatgaagatacatctattagtaatgacatggacttacttattgtacctggaatagcttttcaaacaaatggttttcgtataggatacggaggaggttactatgataaatttctaaatcaacacgatattaactcgattagtcttatatatgacttccaaatatcagatttcgatgtggaaaaacatgatcaacctgtagataatttaattatatgtaatactaaatttgggaggaattaatgaatattgataaactatattggaaatcaatttattattggatcaaatattttaactataaattagaacacacagataaaaatacaaatgaaatttggttatccaataagaaaaaagaagaacttattgtatttagaaaagaagtgagttcaactcaagagatacgcttcgacaaatctaaaataaatgatcataaagagaatttacaaaaaaagttaggatttaaaattaaaaaagtcgagttcttctactttttagaaacatcgatgaatattgatcatctcgatgaaatgcatcctactaagttgatttatcatagtatcactaatgaaaaagacttagaaaatacaatgcctaattttattttaaaaaagcgcattaataaaaaagaaaaaaaatcatcgttggattataaaaaacgtgtacttaatacgaatcttgttgataagtatatgatgatgttttcaccaatgacttatacacttatagctataaacgttctaatatggttatatatgaagatttatctaaatcatttttcagatattaagttactagatgttgggggattagtacacttcaatgtagtgcacggagagtggtaccgtcttattacctcgatgtttttacattttaattttgaacatattttaatgaatatgctatctttattcatttttggtaaaattgtagagactatcgttggtccatataaaatgttaggtatctatttaatttctggtttatttggaaactttgcttcgttatcctttaatataagtaccatatctgttggtgcaagtggagctatttttggtcttataggagctattttaacgatgatgtacttaagtaagacttttaataagaaaatgataatacaattgttagttgttgtattaatattgatttttgtctcgctatttatgtcgaacattaatttaatggctcatttaggtggtttcataggtggtttccttattacattaataggctattattttcatgagaaccgtaatttattttggttatttttaattttattattagtactttttgttttattacaaattagaatattttcaattaaagaggaaaatatttacgataaacttattaaagacgaaatgatatcttataattatgatgatgctttatcaattgttgaacatacaatcaataaaggatacgatgatgatgaaacatattacttaaagggtttaataactgctactaaaagttctaaagcagaagcaatggctgattgggaaagaggcctaagaagtcatcctaactctgcattactaaactatgaattatccatagctaatagagcattaaatgataacgataaatctttaaaatatataaaaaaagctttaaaaattgatggcaacaaccaaagctataaaaatttagaaaaagaattgaaagatagtaatgaatctaaaaattaacaatttttatgatgtcttgcaacttttgaaacgttatggttttattatatattttaaagataaagaagatatgtatgaaatgatgcaacaagaaatacgttctctttacaattatgatcttttatcaaaagaagaatatctaaaatgtattttaataattaatcaaagaaggaatgagcataaatgaaaaatattattttagcagctgatataggtggaacaacatgtaaactaggtatctttgatacgaaattagaacgattacataaatggtctattgaaaccgatacttcagaccatacaggtcgaacattattaaggcaagtctttgattcttttaaagaagcaactgaatcttatcactttgatcttcaaaatgttatcggagttggtataggagttcccggtcctgttgattttgaaacgggaatcgtacatggggctgttaatttacattggcctggaaatgtaaatgtgagagagatttttagtgaatttatagattgtcctgtatatgttgataatgatgcaaatgtagctgcactaggtgaaaagcataaaggtgcgggtcaaggtgcaaatgatgtagttgctattacacttggtactggtcttggtggaggtatcatttcaaatggtgaaattgtacatggtcataatggttcaggtgcggaaataggtcatattagaactgattttgatcaacgttttaattgtaactgcggcaaatcaggatgtattgaaactgttgcttcagctactggagttgttaatttagtcaatttttattatcctaaacttacttttaaatcatctattttatcacttataaaagaaaataaagtaactgctaaagctgtatttgatgcagcaaaagcaggagatcaattctgcatatttataacagagaaggtcgcaaatcatatcgcttatttatgtagtataattagtgctacaagcaatcctaaatatattgttttaggtggaggaatgtctacagcaggattaatattaattgaaaatattaaaacagaatatcataatttaacatttacccctgctcaaaaagatactgaaattgtccaagcaaaacttggaaatgatgctggtatcactggtgctgctggactaataaaaacatatataattgaaaaggatggtgttaaataatggctattgttgatgtagttgttataccagttggaacggaaggtccaagtgttagtaaatatattgcagaaatccaaatgaaactagaagaatttaaaaaacaaggtaaaattgactatcaattaacacctatgaatacgcttatcgaaggtgatcttaaagatttatttgaagtagttcaagcaattcacgaattaccatttgataaaggattaaatagagtatgtacaaatatccgtattgatgatagaagagataagtctcgtaaaatgaatgataagttaaaatctgttcaaaaacacttagataaacaaggtgagtaatatgagaatttctaatttatctttaggattagttgatacaaacgcatattttatagaaagcgataacagtgtattattagttgaccctgccggagaatctgataaaatatttaagcaattaaatcaaatcaataaacctttgaaagcaatattacttacacatgctcattttgatcatattggtgctttagatgatgtattatccaaatatgatgtacctgtttatatgcataaagaagaattttctttcttaactgatcctgaaaaaaatggttcttcaaagtttaaacaatatggtatgccactcactactagtaaagctcaaccaattgctttagatgaaggtaattttacaattgatgaatttaaatttaatgttattcatacaccaggtcattcaccaggaagtttaacttacgtttttgacgattttgcagtagtcggagatacattatttaataacggtattggaagaacagacttatatagaggagactatgaaacattagtagactcaattaaagacaaattatttgaattagacggagatttgcctttattcccaggtcacggtcaatacactacggtagatgatgaacaactcaatccatatttagatggacaataaaaaaagtaatttaaacacctcttacgtttatatatgtaggaggtgtttttttgaaattattatttcaagaaataattaataaagcaatttcaaaaaatgcaagtgacgtacactttattccttcagaggataaagtacatattaaattcagagtgaatgataggttagagacgtatgaaatatttagtaatgacatttatgaaaaattattaatttatatgaaatttaaagcaaatttagatgtatcaacacatcaagtagctcaaagtggtagatatacttatcatgctaaatcaatattttatttaagaatttctactttacctttgtcattaggaatagaaagttgtgttatcagacttatccctcaatatttcacttctaaaagagagtataaagactttaatgactttaaacctctaatgaataaaaagcaaggtctcattttacttactggtccaacaggttcaggtaaaagtactttgatgtatcaattagtactctatgcttttcaagaattaaatttaaatgttattacaatagaaaatcctgttgaacaattattaaaaggcataacacaagtgtcagtaaatcataaagctggtatagattatgttaattcatttaaagcaatattaagatgtgatccagatgttattttaattggtaaaattagagatgctgaagtggcaaaatgtgttattcaagcaagtttaagtggtcatttagtactaaccactatgcattcaagcaattgtaagggcgcaatactcagattgttagagatggggattagtgttcaagaaatttcacaagcaataaatgtcatttcaaatcaaagattagttacaactactttaaatcaaagaaagcttgtttgtgagtctattacaaataatcaaattcaatatttttttgaacataaccatacgcttcctgagacatttaataatttaaaagaaaaattgttatcgctatcgaaagaaggtcttatatgtgaagatgtggttgaaaaatatatttaacaaacattctaaagttcttagcgaaaaccaacaaattatacttctaaataatttgaataacttacttaaaagtggatttacattattagaatgttttaattttataaatttgtattttaattataaaaataaaaatatagcaaataagatagttaaaataataaaaacgggaggagaatgcgatcaaatattagaattaataggctatcctaaatctattatcactcaaattcaatttgcgcagaaatatgggaatataaatgaagcactagaggaagcaatgaattatttaaaaacaaatcttcaagctaaacaacgaatattaaaagctattcaatatcccattattttaattgcaatatttataactatgttaagtatattaaattatacagttttacctcaatttaaacatctgtattcaatgatggatgttaaactcaatttatcacaaactattattacatatttaattagtcatttaccacaaatttttctttttgttttttctactttactaactttatccatcattatatttatctttcttaataaattagatatatccaaaaaacttacattcatttcttacataccaattgtacgtttttattattcgactataaaaacatatcaacttgctaatgatttagctttattttataaaaatggtattagtattcaacaagtcgtagatatgtacattcatctacaaaacaactcatttttgaattatattggtatcgttattcaaaatgaactaaatagaggcattaatttacccaatattttgattaaaataccatgttatcaatatgatttaatacagtttattaagcaaggtgagaaaaacaataaattagatattgagttgaaaatgtattgtcaaatattaattcaaaggctccaacaaacagctttaaaacaatcaaaaatgatccaacctatcgtatttatattcttaggagcctttatattaagcttgtatctagtaatcatgttacccatgttccaacttatgcaaaatattaaataaagtaaaatggaggtttttatgaaaaaattcaaacataaattaaaagcttttactttaatcgagatgttacttgtactattaataattagtgttttactcattcttattattccaaacatagctaaacaaatggcacatattcaatcaacaggatgtgaagcacaagtgaaaatggtcaatagtcaaattgaagcttatactttaaaacataatagagttcctaattctattgagaacttaataactgaagggtttataaaacaagggcaatcatcttgtaagtctggagaaactatcagtattaaaaatggagaagcagttgcagagtaagagtattaaatcattcacttttatagagagcctattaatcattttgattttaacaatcttacttaatgcaacgttaagggtaaatgtatttaacaatatttctttgtcagacgatataaaagcaacacaatttgttaatcaattagaatattttaaatctaaagcgatgcgtaatcatcaatctattacattgttaatttcaaaacatttctcaattataaaagtaatagaagcacatggtggtcggtacaattacaatattgaagatggaaaaatagttgaagttaaaaatttagggaaaattacttttaataaagaaggaagaacaaatcagtttggctctttaatattgaaaattaatcaacatcaatataaattaatcattaatattgaaaaaggaagaattagatattttaaaatttaaagcagtgttactcatcgatagtttatttagcttatatatattcactactatagtttttactttaattccactactaatcagtttaaatcatacattaaaaagagaataccaaattgttgaaatcaagcaaaccataatgagtagtatcaaccattatgataaaaaaaccatttcaaaaggtataaatttaggtgattatcatattaaactttattccaataaaatatgtggacttcacaaagaaactgaaatcgaatcatgcgttaaatattaaattaaaatcgttcactttaatagaaatgttagtttcattatttttaacaacaatgatgttaacattttttcctcaattaattaaattgactcattcctatttatacgagtcatataatagttatcaaacagaatatgctttttttcagacaaatataactcaaattatttcgaaaaaacatcatgcccttataattaaggataaacatacaattatcattgataatgaatcgtctaaagattatatagaatttaaaaacaacaaactattttacaaaattaatggaaatggcaatatcgttttactaaataacgtcatcaatgcagaatttcaaattttaccttctaacatcataaaattaaatctaaaaataggtgataaaaacgactactatgaaaaaaacttatttttataaaatgaaaggatatataagtagctatacattatttattcttagtatatatttgataattatatctacttattctgctcaatatagtataaaattaaaaacaatacataatattcaaatatattatgatagtataataagtgataaacttaagagaggtgattaggatgactcattcttatttaccacttatattaacaggctttatgggtactggtaaaagtactattggtgaatatttggcttcaaaattatactattcatatattgatttagatacatatatagaaatgaaagaatttaaaacaataccagatatttttaatgaaattggtgaaaaaggatttcgtaagttagaatataactatttaaaggattgtattggtaaatacgatattatatcaacgggaggagggattatagaaaacgatgattctatctcacttttaaaaaataaaacagttatttggttagattgtgatattgatattatctatcatagaattgctaatgatccacatagaccaaatgcgaaaaacaaaagtgaaaaacaattaaaagacttgtatttatcgagagtttcaagatataatgaaatcgcatccacaaaagtagatagtagtaaaacaattgaatgtgtatataaaacaattttaaatcatataccatgcgaatgatcagtattagagagaataacttgaactgattctatagttgttttgaaattatgtcatgttatcgccgaaggtgcaagtaaactacgaaactctcaggcaaaaggataatactgttacgcagtcctggatttgttatttagacagggtagcttctgctactctgctttttttataaaatagggggtttttaaatgacaagcgaattaaaaaagacaccattatatgaaacttatgtaaatagtggtgctaaaatagttgaattcggtgggtgggctatgcctgtccaatttactagtattaaagaagaacataacgcagttagatacaaagtgggtatgttcgatgtaagtcatatgggagaaattttaattgaaggtgaaaatgctagtaaatttgttcaatatttactttcaaatgatactactaatttatctgaaactaaagctcaatatacagctttatgtaatgatgagggtggtattattgatgatttagtaacatataaaattgctgataacaaatacttattaattgttaatgcagccaatactgataaggatttcgaatggattcaaaaacatcaatctaaatttaatgctgctgtaacaaatgtgtctgaacaatatggtcaattagcgattcaaggtcctcaagcaagaactttagtaagtgaacttgttgatgttgatgtaagtgaaatgaagccttttgaattcaaacaaaatgtaactatctttggaaaaaatgttatcttatctcaatctggatatacaggtgaagatggttttgaaatttattgtaattcaaatgatacagttgacatttggaatggttttattgataaaggcgttgtaccttgtggtttaggtgcaagagatacacttagattagaagctggtttacctcttcatggacaagatctcactgaatcaatcacgccttatgaaggtggaattggttttgctgctaaacctttaattgaagatgaatttattggtaaatctgttttaaaagatcaaaaagagaatgggtcaaaacgacgtactgtgggtttagaacttatagataaaggcattgcaagaacgggttatacagtaatgaatcttgacggaaaagaaataggtgaaattacttcaggaactcaatcaccttcttcaggaaaatcaattgctatggctattattgatcgtgatgaatttgagttaggtaaagaattactagttcaagttcgtaaaagacaattaaaagctaaaattgttaagaaaaaccaaatcgaaaaataactaaggggtgtgcaatgtgagtcatcgttatataccattaactgataaagataaaaaagaaatgttagaaacaattggagcaaattcaattaccgagctctttggagatattccaaaagatattttacttaatagagatttaaatatagatagtgcagaagctgaaacttcacttttaagaagattgaatactattgcaaataaaaatattactaaagaaacacatgtgagttttttaggtgcaggagtatatgatcattacacacctgcagtagtagacgctatgatttctcgttctgaattttatactgcttatacaccttaccaacctgaaatttctcaaggtgaactacaagcaatttttgaattccaaacattaatttgtgaacttactcaaatggatgtcgcaaattcatctatgtatgatggcataactagctttgccgaagcttgtatattagcttttaatcatactaaaaagaacaaaattgtagtatctaaaggtctccattatcaggctctacaagtattaaaaacatatattaaagtaagaaaagaatttgaaattgttgaagttgatttaaatggaacgattactgacttagaaaaattagaacaagcaattgatgatgatactgcagcagttgctgtacaataccctaacttctatggaacaattgaagatttagaaaaaattcattcttatattgaaaataaaaaagcgttattcattgtttattctaacccattagcattaggcgttttaacacctccaggacaatttggagcagatattgttgttggtgatacacaaccatttggtattcctactcaatttggcggtcctcattgtggttactttgctactactaaaaagttaatgcgtaaagttcctggcagattagtaggacaaacgcaagatgatgaaggtaatagaggatttgttcttactttacaagctcgtgaacaacatattcgtcgtgataaagccacatcaaatatttgttcaaaccaagcattgaatgctttagcatcctcaattgctatgtcagctcttggtaaacaaggtatttatgatattgcggttcaaaacttagaacatgctaattatgctaaaaatcaatttaaaaataacagttttgaagtcctagatggtacatcttttaatgaatttgttgttaagtttgatcaacctatcaaaaatgtaaataaaaaattagcagaacatggtttcatcggaggctttgacttaggtgaagtttcatcagactttgacaatcatatgttaattgctgttactgaattaagaactaaagaagagattgatacatttgttgagaaagctggtgagctaaatgacagtaagtaaatctagtccattaatttttgaaagatctagagaaggtagatatgcatattctttaccgcaaagtgatattaaaactgactctgttgaacgtattttagatgataaatttattcgtaaaaataaagcagagtttcctgaagtggcagaattagatttagtacgtcattacacggaactttcgaataaaaactttggggtagattctggattttatcctttaggttcttgtactatgaaatataatccaaaaatcaacgaaaaagttgctcgtatttctggatttgcagaatctcatccactacaagaggaagaacaaattcaaggttcattagaaattatttatagtttacaagaagaactaaaagaaattacaggtatggatgaagtaactctacaaccagcagcaggtgctcatggtgagtggacagctttaatgatttttaaagcatatcatataaaaaatggtgaaggccatcgtaatgaagttattgttccagactctgcacatggtacaaaccctgcatcagcttcatttgctggatttaaatcagtaactgttaaatctaatgaacgcggtgaagttgatatcgaagacttaaagcgtgtcgttaatgaaaataccgctgctattatgttaactaacccaaatactttaggtatctttgaaaaaaatattatggagattcgtgaaattgttcatgaagcaggcgggttactctattatgatggagcaaacttaaatgctattatggataaagttcgccctggagatatgggatttgatgctgtgcacctaaacttgcataaaactttcacaggtcctcatggcggtggtggtcctggttcaggtccagtcggcgtaaaaaaagaattagcaagttatttaccaaaaccaatggtgattaaagacggtgatacatttaaatatgataatgatattgaaaattcaatcggtcgggtaaaaccattttatggtaactttggtatttatttaagagcttatacgtatattagaactatgggtgcaaaaggattaaaagaagtgtctgaagcagctgtcttaaatgcgaactacattaaagcacgattaaaagatcgttatgaaatcccttatgaacaatattgtaaacatgaatttgtcttaagtggatctaaacaaaaagaatatggtgtccgtactctggatatggcaaaacgtttactagactttggtgtacatccaccaacaatttacttcccgctaaatgtggaagagggtatgatgattgaaccaaccgaaactgaatctaaagaaactttagactacttcattgatgcaatgcttcaaattgcagacgaagttgaaagtaatcctgataacgtattagaagcacctcatacaactatcattgatagattggatgaaacaactgcagctcgtaaacctattcttaaatttgaagatttacatcaagaaaaactttaatattgtaaatagtttaatggatgatttaatttcagaaataataaaactctcaagaaatttcttgagagttttattatttctgataattattttttagttttaattttaccagtccattttttatagccgcctttaagcatgtataaatctttatatccattttttttcaaaatgcgagcagcacgataactggcaataccatttgcatcacaaagatatacaggttgatctttacgtaaaccttgaaatctttgtctaaacatagatattggaatattgcgagcaccattaatatgaccataatcataatcaactttttcacgtacatcaatgacttgggcttttcttaaacctttatgaaattcgttttgatctagttcagttacagctcgtcgattaagaaagaaatttccaaccatgtaaaggattattaaaactataattattaatgctataatcaaagatacattcatattgcatcctccctaattaaccgatattattaattataaaggtgttagctcaatttatcaaaatttttttattgtttcatattattgatacattctaacgtaatattaacgttgaatttatataaattaagttgtgattggagtttttatatgactgaaacatggaattttatcaatactggaagccatgacccctattataatatggcgatggatgaagccttattaaattttgtttcaagaggggaaattgatcctgtagttagattttatacttgggatcctgctaccttatctgtaggttattttcaaagattaaaaaaagaaattgatatcgataaagtgaaagaaaaaggatttggtttagttcgccgtcaaactggtggtagaggcgttttacacgacaaagaattaacatatagtgttatcgtacctgaatctcatccaaatatgccttctacaattactgaagcttaccgtgtcatttcagaaggacttttagaaggctttaaattattaggatttgatgcttattttgctattccacgttctaaagaagaaagagaaaaattaaaacaaccaagaagtgccgtttgctttgatgctccaagttggtatgaactggtcgttgaaggacgtaaaattgcaggtagtgcacaaacacgtcaaaagggcgttattcttcaacacggatcactacttcaagatgtagatgtagacgaattatttgatatgtttatttttaagaatgatcgcttgaaagaaaaaatgaaaaaagctttcgtagataaagctgtagcaataaatgatatatcagatagacacatctctattgaagaaatggaaaaagcatttgaagaaggatttaaaaaaggattaaatattgaatttaaaccactatctctaactgaaaatcaattagccgaagtaaaagtgcttgaagaaaaatatcgttcagaagagtggttatataaaaaatagaaataaaacaaggaggcttaagagtactaatactcttgaacctccttgtttttattttcgttgtctttttttatattttcgaactgctcttcggtattttctctgatcttctgtaaggaagaaaaaataatagataaagtaaataataagaacaatcattataagtgtgaaaattgatttcatgaacgtcattacaaaaatatttagatttagcagtaaacctatagctgctataattaaaacgaaataaaatataatatttttcaactaaacaactcctattttatgaactactagaaacattaatctgtgataacttcatcttaccttgatttattttctttttattattagattcatagccatttttaatatctttaaaaccagattgaagatttttgtttatttgtttaatatttttgtcttcgttagtattatcatttgatatattacctttatctgtatcacttttatatttactgtaggcatcatctatatcatttgataatgaatttagcttttcaagattttgatttttatcatctttttttgttttatttaaatcaagttgattaaatttatcgataatcttagcaatatctttataataatttgaagaagcttgtaaaaaattagcttcattattattatcaacagttttagatacattctttttatctttatttaatgcttctaactgagatttttgattatttatatcttgatttagttgttgaatttttaattttaaattatgattctcatctcttaaattggttgttttatcttctaaaggtcctaaattttgagagccacagccaaccaaaaacaaagaagctcctaaaatcgttaataatcttttcatgtaaatctccctaaatcaaaatatctttaatattttaagtatgttattattttaatgtatataataaaaatgtacaaacgttatacaaggagtgggttaaatggataaattagctaaagttcgtcatatattagaaagtgaaaatcttgatgctcttgttatattatctgactataatagacgttatatttctgattttaccggaacaagtggcgctttaattatttctaataatgaaaataagttgattacagattttcgttacattgaacaagccacaaaccaagccactcattttgaaattgtaaatcgacgtagtgggattattgatgagataaaagaaattatagaaaacaagcagtataaaacagtaggttttgaaggtcatttagttagctatgatacgtttcgagaattaagccaaattgatacgaattacgtaagtatagacaatgccattgaaaaaattagagaagttaaatcatctgaagaaatcgataaaataaaatatgcggctaagatcgtggatgatacttataactacattttaaacattgcaaaagttggaatgactgaaagagagttaaaagcattgcttgaaagcaaaatgttagaactaggcgctgatggtccatcatttgatacaatcgttgcttctggttatagaggggctttgcctcatggagttgctagcgataaagtaatcgaaaaaggtgacatgattactcttgattttggtgcatattatagaggatactgttcagatattactagaacatttgcgattggtgaacctgataaaaaattgaaagaaatctataatatcgtgcttcagtctcaaataaaggcaattgaagaaatcaagccaggtatgacaactaaggaagctgatgcattatctagagattatattaaagcacatggttatggtaatgaatttggtcattctttaggtcatggtattggtttagatattcatgaaggtccagtattatctaaaaacactaatgatacagttcaagttaataattgtgttactattgaaccaggtatttatgtagatggtcttggtggagtgcgtatagaagatgacattttaattactgaaaatgggtgtgaagtctttactaaatgcacaaaagaccttattattttatagtaagcgtataattgaggaggaaactgaatgatttcggttaatgattttaaaacaggtttaactatttcagtagataatggaatttggaaagtaattgatttccaacacgtaaaaccaggtaaaggttctgcttttgttcgttctaaattacgtaatttaagaacaggcgctattcaagaaaaaactttccgagctggtgaaaaagtagaacaagcgatgattgaaaatcgtcgtatgcaatatttatatgctgatggagatactcatgtcttcatggataatgaaacatttgatcaaacagaattatctggcgattatttaaaagatgaattaaaatatttaaaagcgaatatggaagttcaaattcagtcatatgaaggcgaaacgattggtattgaattaccaaaaactgttgaacttgaagttactgaaacagagccaggtattaaaggtgatactgcaactggtgctacaaaatctgctacagttgaaactggttatactttaaatgtaccattatttgttaacgaaggcgatgtgttagttattaatacaagcgatggcagttacatttcaagagcataattaataattttaaaaatttaaattaaaacaggttaatgcatatttaattatggattaacctgtttttatataaatgattaaaaagaataatcaatattttagtatctaagttttaatataaatttactatattataattgcttatatacttttttaatcataagttagatctcagttaaatgaacacgcttgaattgaatttcacactcaagtaaaatagatgggtagatgaaaactaagtcgaggagtcattaaattatgaactttaaagaaattaaagaattaattcaaattcttgatgaatcaagtttaactgaaattaatatagaagataataaaggtagcgtagttaatttaaaaaaacaaaaagaaactgaaattattacgcctcaatattcacaacaaccaacagtgatggcatctcaaccatcagtacaaacaccaatggcaaatgaaatgtctcaaactagtgaagtaaaccaagaaaatgaaacgtcaaactacgaaacaattaatgctccgatggtcgggactttttataaatccccatcacctgaagaggaagcttatgtacaagttggggataaagtcactaatgattcaactgtatgtatcttagaagccatgaaattatttaatgaaattcaagcagaagttacaggagaaatcgttgaaattttagttgaagacggacaaatggtagagtatggccagccgttatttaaggtgaaataatgaaaaaagtattaattgcaaatcgtggtgagattgcagttagaattattagagcttgccatgatttaggtattcaaactgttgctatatattctgagggagataaagatgcattacatactcaaatcgctgatgaagcatattgtgtcggtccaactcagtctaaagattcatatttaaatattccaaacatcctatctatagcaacttcaacaggatgtgaagcaattcatccaggttatggatttttagccgaaaatggggatttcgctgaactttgtgaagcttgccaattaaaatttattggaccaagttatcaatccattcaaaaaatgggtattaaagatgtagctaaagctgaaatgatagccgctaacgtgcctgtagtaccaggaagtgatggattaattgattcgattgaagatgctaaaaaagtggctaaacagataggatatccagttattattaaagctactgctggtggcggaggtaaaggaattcgcgttgcacgaaatgagaacgatttagaaaatggttaccgtatgacacaacaagaagctcaaacagctttcggtaatggtggattatacttagaaaaattcattgaaaatttccgtcatattgaaattcaagtgattggtgatcaattcggtaatgtcattcatttaggcgaacgtgactgtacaattcaaagacgtatgcaaaaattagtagaagagtcaccttcgccaatacttacagatgaaaaacgtaaagagatgggtaaagccgctattcgagcagctaaagcagtgaattatgaaaatgctggtactatagaattcatatatgatttaaatgaaaataaattctattttatggaaatgaatacacgaattcaagtagaacatccagttactgaaatggtaacaggtgtagacttagtgaaattgcaattaaaagttgctatgggagaaccgctaccttatacgcaagatgatattacaataaatggccatgccattgaatatagaattaatgctgaaaatccttataaaaattttatgccttcaccaggtaaaatcacacaataccttgcgccaggaggatacggagtaagaatcgaatcagcatgttatacaaactatacgattcctccttattatgactcaatggtagcaaaattgattgtgcatgaacctaccagagatgaagcaataatgactgggattcgagcactaagtgaatatttaattctaggaatagatacaaccattccattccatcttaaattaatgaataatgatatttttaaatctggagattataatacaaactttttagaaaagtataatattatggctgagagtgaataggaggataaaacaatggtaaatgtagcagattattcacatgctaatttaggtaaagtagaaattgtaccagaagttatttcagtaatagcaagtattgctgtttctgaagttgaaggagtgactgggcatttttatgaactaaaaaagagtaatattgaaaaaataagtcgtaaaaatttaaataaaaatttaaaagttaatactaaagatgatggtattcatattgatgtttattgctctattaaacatggaataaaaatagctaaagttgcaagtaaaattcaaacttctatttttaattccattaaaacaatgactgctatcgaacccaaagaaattaacattcatatcatgcacatcacaattgaataaattaaagttaccataatacaaaggagtttcttatgagtcgcaaagaatcaagaaaacaagcatttcagacattgtttcaactagaaatgaaaaatacagatttaacaatcaatgaagctataaattttataaaagacgattatccagacttagattttgagttcattcattggcttgttacaggagtgaaagatcatgaacaagttttagatcaatcaattgaaccaaaattaaaagactggtctatacaacgattattaaaaacggatcgtattattttaagaatggctacctttgaattgcttcatagtgatacgcctcctaaagtcatcattaatgaagcagtagagctaacaaaacaatttagtgatgaaggtcattataaatttataaacggtgtcttaagtaatataaaataaacatatttgagtgatgaatcatgtcagaatatttaagtgtctctactttaactaaatatattaaatataaatttgatcaagatccacacttgcaatctatcctattaaaaggtgaactctcaaactttaaaaaacattctagtggtcatctttattttaatgtgaaagataaaaatagtgtgataagtgctatgatgtttaagggaaatgcttctaaactaacatttgatcctaaagaaggagacgaagttttattagaagctcgagtttcggtttatgaacgtagaggaaattatcaaatttatgttaataaaatggaaattgacggtataggaaatttataccaaaagttagagcaattaaaagaaaaactaaataaacaggggatttttaatcaaaatcataaaaaagcaatccctagattccctaaaaagattgctattcttacagctgatactggagcagcaatcagagatattcacactactatagatagtagataccctctagtagaaaaaatatcaattagtacattagtacaaggtattaatgctaaaaatgatattattgaaaaaattaagtatgcagatactttaggagtagataccatcattctaggccgtggaggcggctctattgaagatttatggaatttcaatgaagaagaagttgttcgagctatatatgagtgtcatacaccaattatctcagctgtaggacatgaaactgattttactttaagtgattttgtagcagatatgagagcagcaactcctactcaagctgctgttatcgctacaccagatcagtacgaactcattcagcaaatacaacagtatcgattttctcttactaaaagtattaaacaactaatagaaaaacaacataaacaattagattatttatcatcttattataaatttaagcaacctacgttgttatatgaacaacagattcaacgaagagatgatttagaaaaaaaactaacacaacgtttaacgttaaatattgaaaaaaaaagaaacaatatcactgtattgcgtcaacattttaatataagaagattaaatgattcaattgtacaatatcaaaaaatgatccgtaataatgaaaatagattaataaatttaacatataacttaattaatcataataaagctaatttaaagaataaaattgagcaattaaatcaacttagtccaactaatacaatgttaagaggatattcaattattaataaggacaataaagtcattacaagcacacacgatttaaatgaacaagatgaaatcacattatcaatgaaagacggtaatatagacgctatagttaagaaagtaaggtgtgaagatgagtaaagaacaacaaagttttgaagaaatgatgaaagaattagaaagtatagttcaaaagttagataatgaaactgtttcattagaagaatctcttgatttatatcaacgtggtatgaaattatcatctgcttgtgacaaaactttgaaagatgctgaaaataaagtaaatcaattaatcaaagaagaagcaaaggatgaagatgatgttgaagaaatcaatgaatgaattgattgaaattataaataataatcttgacggtattataaaatcgtctcctttaaatactaaactagaggagagtatgcaatattcacttgatgctggtggtaaaagaattcgtccagtgcttgtattactcactttagaagtgttaaatgaaaattataaaaaaggtttacaaaccgcactggcattagaaatgattcatacttactcacttatacatgatgatttacctgcaatggacaatgatgattttagaagaggaaaattaacaaatcataaagtgtatggagaatggaaagcgattttagcgggagacgccttactaacaaaatcatttgaactaattgcaaatgataaaaacttagatgctgaaacaaaagtaaaagttatttcaagactagcacatgatagtggcaatctcggcatggtcggtggccaaaccttagatatggatagtgagaatactccaatagaattacatactctagagcaaattcataaggcaaaaactggggctcttttaaaattttctattttaagtgctgcggatattgccaatgtaaacaaagaaattttaaatacattagattatttcagtgaacacttaggcctaatgtttcaaataaaagatgatttattagatgtttatggtgatgagaaaaaattgggtaaaaaagtaggaagcgatgtagaaaaccataaaagtacttatgtttctttacttggtaaatcaggcgctgaagaaaaactaaaatatcataaagatgctgcaatagatacaattaatcaattgaaaccacaatatgatgttgaaccgcttctagaaattgtagatttattttattcacgtgaccattaatagttagagtttttctctttaaagattactaagacaataatctttaaagagttttttgttttagtaatctacttttaatgatttaaaatgcataaatgtatataaatttaaatttaatttaaatagaaaatatgataatacgtatcataaataataatatcattcttcaaatcaacctttctaaaggataactttagtagtagttaaaataacgttgtgttaaaatcattgtataaatattcgaaactaggagtgttcataatggcaaaaaaatctgtaagacatataaaaataagagaaattatttcaagtgaacaaattgaaacacaagatgaacttgtaaaacgtctaaatgaatacgacctaaatgttactcaagcgactgtctctcgtgacattaaagaattacaattaattaaagtacctgcttcatcaggacagtatgtatacagccttcccaacgatagaaagtaccatcctttagaaaaattaggtagatacttaatggattcatttgtaaatattgaaggaacaggaaacttactcgtactaaaaacgcttcctggtaatgctcaatctatcggagcaatcttagatcaaattgattgggatgaagtattgggaactatttgtggtgatgatacctgtctattaatatgcagagatgaagaagcaagtcatacaattaaaacaagaattttcaatttattataaggatgcgattaatctatgttacaaaccttatcaataaagcaatttgcaattatagatgaactcgaaattcatttttctgatggtttaactgtgcttagcggtgaaactggatctggtaaatcaattattatagatgcaataggccaacttattggtatgcgtgcctcttctgattttgtaagacatggagagaaaaaagcaattatcgaagggatttttgatattgataatagtaaagaggccatttcagttttaaatgagttagatattgatattgatgaagactttctattagtaaaaagagaaatttttagttcgggaaaaagtatttgtcgtattaataatcaaattgttacgcttcaagatttaagaaaagtgatgcaagaacttttagacatacatggccaacatgaaacgcaaacgttattaaaacaaaaatatcatttaaaattattagatgattatgctgaaaatcaatatagcagtgttaaagaacaatatgaaactacatttaatgaatataaagaaaagaaaaaagaacttgaagagttacagtctgctgatcaagcattattgcaacgtcttgatttaatgaagtttcaatttgaggaattgcaagaagcctctctaaaagaaggtgaaattactcaattagaatctgatataaaacgaatccagaattctgaaaaattaagtttagcattaaacaatgcacatgtcacacttacagatgaacatgctatcactgaccgtttatatgaattaagtaatcatttacaaactattgatgacattattccaggtagatttaaaaaacttaaagaagatattgatcagttctactataccttagaggatgctaaacatgaactatacgatgaaatgtcaaatactgaattcgatgaacaattacttaatgaattagaatctagaatgaacttactgaataatctcaaacgtaaatacggtaaaaacattgatgaacttattacttatcaatctaaattagaaaatgaaattgctaagattgaaaattatgaagaaagtacttctcaattaaaagaagaaattgacctactttatgaaaaagtaataaaatatggacagtcattatcgaaggaaagacgaattgtagctcgaacgttacgggagcatatcgtggctgaaattcaaaatttacaaatgaaagaggctaacctcgaaatttcatttcagccattagaaactcctacaatagaaggaattgaatttgtagagtttctcattagtcctaacaagggcgaaccacttaaaagtttaaataaaatagcttctggaggagaactttctcgtattatgctagcgttaaaaagtatattcgttgaatcaagaggtcaaactgctattttgtttgatgaagttgactcgggtgtttctggtcaagcagctcaaaaaatggctgaaaaaatgagagatattgcaaaatatattcaagttatttgtatatctcacttaccgcaagtagcttctatgagtgatcatcacttattaattagtaaaatgtctaagaatgatcgtacaacaactcaagtgaaagagttaaaaaaagaagataaaattgacgaaattgcccgtatgatttctggagcaagtgtaactgaattaacaagagaaaatgctagagaaatgattgctcaaaatcataaatagtttataattaaataatttaaattaaggttggatgtcgaaaagaaatagaacatattgagtataatgttattttttatattcaaattgtttattcacacttttcaattctaacctttaaatctgattaataaggagtagcaaaatgtctgaaaaacaatatgacttagttgttttaggtggtgggacagcaggatacgtagcagcgattcgtgcttctcaattaggaaaaaaggtagcaattgtagagaaatctttattaggtggcacatgtttacataaagggtgtattcctactaaagcgctacttaaatctgctgaagtgactcgtactgttagacaatcttcagaatttggtatagacacaaacggtttacatattaattttgaaaaaatgatgaatcgaaaaacggatattgttaatcaaatgcataatggcgttcaaagtttaatgcaaaaaaatcatattgatatttataatggtattggacgtattatgggaacttctatattttctccacaaagcggaacaatctctgttgaatacgaagatggcagctcagagttacttccaaatcaatttgtacttatcgctacagggtcacgacctcaaacattaccatttttaaaaattaatcatcgaaatattttatcgagcgatgatatattacaaattgatacacttccagacagtattgctattgttgggggcggcgtgattggccttgaatttgcttccttactaactgatttaaatgtaaatgttaaagtgattgaagcaggtaaacgtatattaccttctgacagtaaatccatttctacatttttaaaagatagtttaattgaacgaggtgtagaattttttgaagattgccaactaaatgaagagaatatcatacataaaaatgatgtcatccaaatacatataaatgaaaaaactactattacagttgataaaatattagttgcagtaggtcgcgtacctaatacaagtgatattggtattcaaaatactaaaattcaattagatactcatggttatatcaaagtaaatgaatttcaacaaacgagtgataagcatctttatgcagcaggtgattgtatcggaacattacaattagctcacgtagcttctaaagaaggaatcactgcagttgaacatatgtttaatgatcatccgcttccagtgaattatcatttaatgcccaaatgtgtttatacttatccagaagtcgcatctatcggtttaaatatagaaactgctaaatctcaaaatattaaggcaacaagttataaagttccttttaatgctattggaaaagcagttattgaagaaactaaaaataaacgtggtttttgtgaaattatattaaataaggacaatggagatattattggtctaagtatggtaggcccacatgtcacggagttaataaatgaagttgctttattacaatttatgaatggatcaacattagaattagggttaacgactcatgcacatccgtcattgtctgaaatattgatggaacttggactaaaggctgaaaatagagcaatacacgtttaaaggaggaaataaaaatgattgactacaaatctgtgggacttacagatgaagatttgagagaaatatataaatggatggacttaggacgaaaactagatgaacgcttatggttacttaaccgtgctggaaaaataccatttgtagtaagtggtcaaggacaagaagccactcaaattggtatggcgtatgcaatgaaagaaggagatatttcatctccgtattatagagatttagctttcgttacatatatggggatttcaccttatgatacaatgttagcttctttcggtaaaaaggatgacattaattctggaggaaaacaaatgccttctcattttagtcatagagaaaaaggtattttatctcaaagttctccggtagcaacacaaatccctcactcagtaggagcagcattagcattaaaaatgaatcaacaatctaatatagcaactgctactgtaggagaaggtagttctaatcaaggagattttcatgagggattgaattttgctggagtccataacttaccgtttgtatgtgtaattatcaataataaatacgcaatttcagtaccagattcattacaatatgcagcaacgcatctatctgatagagcaataggttatggtattcatggagaaaccgtagatggaaatgatccaattgcgatgtacaaagcaatgaaagaagcaagagaaagggcacttaatggcgaaggagcaacattgattgaagctattaccactcgaatgactcctcattcttctgatgatgatgatacatatcgttctaaagaagaaagagatgctttcaagacatctgactgtaatcttaaattcaaaaatgaattactcgatttaggcattattgatgaagattggttaaacgaattagataacgcacataaatctattatagataaagctacaaaagatgctgaaaatgctcaatatccagatgtagaagaaacatatcaatatgtgtatgatccagaaggagatattttcaatgactaaaatgagttatatagaagccattcaaaatgcacaagacttggctatggaaaaagataataatatttttatattaggagaagatgtaggacgaaaaggtggtgtattcggtgcgacacgtggtttacaagaaaaatatggagaactgcgcgtaattgatacgcctttagcagaatcaaatattatcggtactgcaattggtgcagcaatgcttggcaaacgtcctatagctgaaattcaattcgcagattttattttaccagcagttaatcaaattattagtgaagccgctaaaatgcgatatcgttctaataacgattggcaatgtcctttaactgttcgtgcaccattcggtggtggcgtacatggtggtttatatcattctcaaagtattgagagtatctttgcatctacacctggattaacaattgtaattccttcaactccatatgatgcgaaaggtttattattatcttcaattgaatcaaatgatccagtattattttttgaacataaaaaagcataccgatttttaaaagaagaagtacccgattcttactatactattcctttgggtaaagctgatgttaaacgtgaaggtgatgatattacagttttcacttatggtttatgtgttaactattgtattcaagcagccgatattttagaggcagatggcattaatgttgaagtagttgacttaagaacagtttatccattagataaaacaacgattattgaacgcgctaaacgaaatggtaagattttgcttgtaactgaagataaccttgaaggtagtgtcatgtctgaagtttcagcaatcatagctgaacattgtttattcgaattagatgcaccaattatgcggttagctggtcctgatgttccatcaatgccattttctcctaacttagaaaatgaagtaatgatgaatcctgataagatattaaaaaaaatgcgtgagttagcacaattttagggaggtaacataatggatgttaaaatgccaaaattaggagaaagtgtccatgaaggtacaatcgaacaatggttagtttctgaaggggatcatgtagatgaatatgaaccactatgtgaagtagttacagataaagtaacagcagaagttccttcaactatttctggtacaattacagagttaattgctactgaaggtgaaacgattgaaatcaatcaaatcatttgtaaaattcaacccgatgatacatctttaaattctaatcaagacgatactaatgaaacacctagtcaaacacaaagtaattctgtaaagagtcagtctaagccttctaacacaaatcaatcatctacgaattcgatcaataatggaagattttctccagtcgtatttaagatagcttcagaaaacgatattgatttatcacaagtacctggcacaggatttgagggtagagtaactaaaaaagatattgaaacttatattcaagaaaataaccagcaagacttaaaagaaacacctaccactcagataaccaatcattccgaaacgagttcaagaaataataacgcttcatcaaataaaccattagacgattatacagtaccagttaaaggcgtgcgaaaagcaattgcccaaaatatggttaccagtgccactgaaattccacatggctggatgatgatagaagtcgatgctacaaaccttgtgaaaactagaaatcattataagactgtgtttaaaaaacaagaaggatataatttaacattctttgctttctttgtaaaagctgtagcagaagctttgaaatctaatccattacttaacagcagttgggatggtaatgaaattataattcataaagacatcaatatttcgatagctgtagctgatgaagacaaattatatgttcctgtaattaaaaatgcagatgaaaaatcaattaaaggtattgctagagaaatcaatcaactagcacaaaaagctcgaaatcaacaactgactcaagaagacatgactggtggtacttttacagttaataatactgggacatttggttctgtatcttcaatgggtattattaatcatcctcaagcagcaatcttacaagtagaatcaattgttaaaaaacctgttgtcatcgacgatatgatagctataagaaatatggttaatttatgtatttcaattgatcatcgtattttagatggtgttcaaactggacgatttatgtcgcaagtaaaaaatcgaattgaaagctattcaattgaaacaacaaatatttattaaaagtttgttatattacaaccaacctatttgaactatatgttggaaattagtaaaatgacaataaataataattgactgaaaggtgattctaaatggatttaaattttgatttatatatgaatggtgttgtagaacaagctagaaatgaaattgaatctgctggttatgaacaattaactacttcagatgaagttgataaagtatttaaacaagatggtactacactagtaatgataaattcagtttgtggatgtgcaggaggtatagcgcgtccagccgcaagtcacgcacttcactatgataagttacctaatagattagttactgtatttgctggtcaagataaagaagcaactcagcaagcaagagaatattttgaaggatacgcaccttcaagtccttcatttgcacttatgaaagatggtaagattactgaaatgatagaacgccatcaaattgaaggtcatgacgtaatggatgttatcaatcaacttcaaaagttatttgataagtattgtgaagaaagataagaggaacaatacatgctaactttaaatccttatagaattggatttagaacacttaaaacagctgtaggaattacattaggcgttattctagctaaatggataggacttgataactatgcttcaagtgctatcctcattgttctatgtattaaacatactaaagttcactcactacaagcaattggttctcgattcgtttcgtgtttattaatgttattttttggttcatttatttttaatttacttggtcaaaatgcagtcgttttaggattaattgttttattatttattccacttacagtgatgttgaatgttcaagaaggtgtagtgacaagttgtgtcattttacttcacgtatttaatgccaaagttattagtcttcatttaattattaatgaaattttacttcttataattggtttaggaatagcatttttaatgaatttaattatgcctagtctagataatacattaggtaattttaagaaggaaattgaaaatgaaattaaagcaatatttaaacaatatagtgaagcatgtttaaatattaataaacaattgtcaatttcttttgatacattagaaaacaatattcgtaaggctaaatctattgcgtttagagacgttaaaaatcactttgtgcgaaatgaaaactcatattatcactattttgatatgagagaagaacaactagaaatactacgcagaatccaaacattaattcataatacttcatctaatgatcctttgttagagactgttgcccatttaatgactgaaattggagataatgttaatagtaatgattatactgtgttaagactacattcattatatgagatacgtttaaaattagacgaattgccattgccagaatcacaccaatctttaaaatcaagagcaagtatgatgcaaattttaaatgaattagaagaatatttaaatattaaatctcaattcggctctttaaaattacatagtgaaatataacatctaaaaataatttctaatcaaagtaaaaagacaaacttcctttaaatacaaaaagtttgtcttttttatttgcataaatttaagaaataataataaaaactatcgtcaaatttggttttttgtcgatagtttctattctaagtaatttttaatgcatgagaggaacaagacttgtaagtaacagtgcagctacaactgcaattaacatgataatgataataatttttagcactttattattcaatgtaaacgctccttgaaacctttaaataatttaattattcgttatattaataacttataatatataaaataaccttaaatgatttcgataaaaatggcaatcaatttatttactctaattctcaaagtcagttaaaatattaactatataagaaaggggttttcataatgattaatagtcgccgtttacttaatacttttttagagttagtgcaaattaattctgaaactgggaatgaagaaacgatacaacccattctaaaaaagaaatttatagatttaggattaaatgttgtagaagataatgcgtctaaaagagaatggtaaggtgcaaataatttaatttgtaccttaccaagtagtgaaggaaaagaaaatgtttctaaaatctattttactagccatatggatacagttgttccaggtattaacgttaaaccaatccttaaagaagatggctatgtatattcagacggcacaactgtattaggggcagatgataaagcaggtatagctgctttgttagaaatgattcaaactataaatgaacaagaattacctcatggacaaattcaatttattatcactgtaggagaagaagcaggtttaaaaggtgctaaagaattagatcaaaacttaatagatgcagagttcggctatgctgtcgatgccagccaagcggttggaacaacagtggtgggtgccccaactcaaatgattattaatacaactatttatgggaaaacagcacatgctagtaaacccaaccaaggtataagtgcaattcatattgcagctaaggcgatcaataaaatgcatttaggtcagattgatcaagataccacagctaatattggtaaattttatggcggttctgctacaaatattgttgcagataaagtcattttagagggagaagctcgttcgcataatgataaaagtttagagtatcaagtcaaccatatgaaagaaactttcgaaactacagcaaaagaattaggcggtaaagaaaatgttgaaatttctaagagttatcctggttttagaagaaacgattctgagactgtaactcagtatgctataaagagtgcgaaaactttaggtctttcaggtaaaactgttattgctggtggcggttcagatggcagtattattaacacgtatcatattccaactgtcatattaggtgtaggatatgaacatattcatactacttctgaacgtattcctgtagctgctttaaatcaacttacgagtcaattgattaaaattgttgaattagtagcgaaataatattttactttagtgaagtcatttatatttttgtgatacaatactaatgaaattattgaataagagaggtaagtaatatgactcaacaaataggtgttgtaggtttagctgttatgggtaaaaaccttgcatggaatatcgaatcacgtggttatagcgtatctgtttataaccgttctagtgataaaacagatttaatgattaaggaatcagaaggtaaacaaattcatccaacgtattctttagaagattttgtgaactctttagaaaaaccacgcaaaatattattaatggttaaagctggtcctgctacagacgcaacaatagatagcttattacctttattagatgacgatgacattttaattgatgggggtaatacaaactatcaagatacaattcgtcgtaacaaagctcttgctgaaagtggtatcaactttattggaatgggggtttctggtggtgaaatcggtgcgttaactggtccatctttaatgcctggtggtcaacaagaagcttacaacaaagtaagtgatattttagatgccattgctgctaaagcaaaagatggtgctgcatgtgtagaatatattggaccaaatggtgcaggacattatgtaaaaatggttcataatggtattgaatatgctgatatgcaattaattgctgaaagttatgcaatgatgaaagaattattaggtatgtctcatgaagaaatttctaaaacttttaaagaatggaatgctggagaattagaaagttatttaattgaaataacaggcgatattttcactaaattagatgaaaataatgagcctcttgtagaaaaaattcttgatactgctggtcaaaaaggaactggtaaatggacatcaattaatgcattagaattaggtataccattaacaatcattactgaatctgtatttgcacgtttcatttcttcaattaaagaagaacgtgtgaaggcatcgaaagtattaagtggtcctaaatcaaactttgatggaaatagagaagaattcttagaaaaaatccgtcaagcgttatatatgagtaaaatttgttcatacgcccaaggtttcgcccaaatgcgtaaagcgagcaatgaaaacgaatggaaccttaaattaggtgatttagcaatgatttggcgtgaaggttgtattattcgtgcccaattcttacaaaaaattaaagacgcatatgacaataattcaggtcttcaaaacttattattagacccttatttcaaaggtattgttactgaatatcaagatgcacttagagaagtagttgctactggtgttaaaaatggtgtaccaacacctggtttctcagcaagtatcaactattatgatagctaccgttcagaagatctacctgctaatttaattcaagcacaacgtgattattttggggcacatacttatgaacgtaaagataaagatggtattttccatactcaatggactgaagaataattattgcatgattaaaaatctgggacatcattaagtgtctcagatttttttattatgataggtttgtatagatgtcttaataaatatagtcttgttattttaatttatatttaatcgatatatcccaagttgacatttagagactcgattagtacgataaatataggtgtaaacgttttctaaaaaactggattatccatatataatgttattacatattattttatatttctataaatccagaaaaaattagattatatattaaagactaacattgactattaaaataactaactcgaatactatgatttattatttcaaagttcatttatttacataatattttcaaaggagcgatataaatggaaaaaaattggtggaaagaagccgtagcatatcaagtgtatccaagaagttttaatgatagcaataatgatggtattggtgatttaccagggatggtagaaaagttggattatctgaaagatttaggtattgatgtcatttggcttagtcctatgtataaatctccaaacgacgataatggttatgatattagtgattatcaagatattatggaagaatttggaacaatggaagactttaatcatttgttatctgaggttcataagcgtggaatgaaattaattttagaccttgttgttaaccatacatctgatgaacacccatggtttatagaatctcgttctagtaaagataatcctaaacgagattggtacatttgggcagatcctaaacctgacggttctgaacctaataattgggagagtattttcaatggttcaacatgggaatatgatgacacaacaaaacagtattatttccatttatttagtaaaaagcaacctgatttaaattggagtaatcctgatgttagagaagctgtttttaaaatgatgaattggtggttcgaaaaaggaattgatggttttagagtcgatgcgatcactcatatcaaaaaaacatttgaagctggtgatttacctgttccaaaaggaaaacaatacgctccagcatttgatgttgatatgaatcaaccaggcattcaagattggcttcaagaaatgaaggacaaatcacttagtcattatgacattatgactgttggagaagcaaatggcgtgaatccagataatgcaaaagagtgggttggagaaaaagaaggtaaatttaatatgattttccaatttgaacatttaggtttatggagtactggagactctaaatttgatgttttatcttataaaaatgtattaaaccgttggcaaaaacaactagagggtataggatggaatgcactatttatcgaaaatcatgatcaacctagacgtgtttctacttggggagatgataaaaagtattggtttgaatctgctactagccatgcagtggtatatttcttacaacaaggcacaccttttatttatcaaggtcaagaaattggtatgacaaactatccatttgaaagtattgaaacatttaacgatgttgctgtaaaaacagaatatcaaattgttaaatctcaaggtggagatgttaatcagttattagataaatataaaatggagaatcgtgataattctagaacgcctatgcagtggactaatgaagtaaatggaggttttactgaaggtacgccatggttcccagtcaatcctaactataaaacaataaatgtagcacaacaatccgaggattcagattccgttcttaatttttataaacgtctaattaaaataaaaaaatctgatgatatatatacttatggtgaatttaatttaatcgatgatgcgaacgagaatatttttgcttacacacgtaaactcaataataagacagttctagttgcaggaaatttaacagatcatgttgcatcattaaatttaccattcgaagttgaaccatctcaaattaagctacacaattataaaaatgatttagatatcactaatatgagaccttttgaagcgttcgtagccgaactttaatagtaaagcgttagatgacataagtttaataacttagtcatctaacgcttcttttattctatatcataagtttcttgtttaataggtagccataactgtattttagtgaacgggtcctcgaatgagagatcaaaaggataaatttcaacatataagctatttttttcataaggtagagtaagttgtaagctggattcaatataataccaagcttcattaacagtataatccacttgaccttgcaaattaaattttgcatagtgtcgccctggcaacaatcgactttctaagtgagctggataacgttcactaggtacgcccacaaataattctacaccttcatctaaaggacatgtaataacaaataactcatatggacttatattattatatcgttttaattcttttattttaccatctaaatataaatcttctaaaaaatcaggaactttgtaagggttagatagttgattagcctcaatatattttacatatccaactaaaggtgtgtctttagttgtttctagtctgtaagggtatggtgctctttctgtagttgttaatttaatatacaaacgttcattcatttttagttcttcttttttagtagaagcttgaataggagatattccatgaaaatcactaaaatcatttgcaaagtcattggaacttaaataattatagcgttttgctacatcaaccaatctcgaagaactttgtatcatttctttagcagcttcagtcatttttcgagagtgagcataactttcaggaggttgtccaacaatcattttaaacgattgatcaagatggtaaggggaaagaccaacgtaatcacttaaatcttgcaaattaaaaggctctaataaatgatcttctatatatacaattgcctgttgtatctgcttgataacgtccaaaaccttcactccaataaatttacaatcaatactaatattttacattattttataaaaatatacatcaataatataaaattaaattaaatttttaaatgactctttcaatattcaatttaaaaaggacaagaccttattttcaatgagtgaaaataatataatatgtcttatcctttatacatctatcacatgaagcttctagtatatctgtttattgaatatcgtcccaccaatgatttccatctctgcttaataataaatcactttcgatagggccatttgtccctgatttataattagggaagtttggatcaatcatggtccaatgttcttgaatagcgtctacaaatttccatgtagatttaagttcttcccaatgtgtaaagttggttgcatcacctttaagacaatcgaataacaagttttcatatgcatctactgtgttcattttatcttgtgcactcatagcataagacagttgaacaggctttgtttcgataccttgaatacttttcttagcatttaagtgtaatgaaatcccttcattaggttgaatattaataactaataaattagaatctagtagtcgatccgtttgataatataaattcataggaacttctttaaattctacaacaacttgtatacatttagacttcatacgcttaccagtacgaatgtagaatggtacaccagcccaacggaagttatcgatagttaatcttccagaaacaaaggttggtgtattggaatcagacgcaacacgatcttcatctctataagcgataacacgttggtcattaatagtcccttctccatattgtccacgcacaaagttttgattgacttcttcaggttttaattgtcttaaagattttaatactttcaccttttcagctcgaatatcttcacttttaagactaataggtgcttccattgctagtaatgcaaccatttgtaacatatggttttgtaccatatcttttaatgcaccgctcgattcataataacctccacgatcctcaacacctagtatttctgaagaagtgatttggatattagagatatacttattattccaaagaggttcaaacatcgcattagcgaatcgtagaacttcgatattttgcaccatatctttaccaagatagtgatcaattctgtatatttcttcttctttaaatgattgtcgtaattgattatttaatttttcagcagatttaaaatcactaccaaatggtttttcaattacaaggcgtttaaatcctttagtttcagttaagccagaagcttttaaataatcagaaattggtccaaagaattgaggtgccattgctaaatagaataggcgattaccttctaatttaaatgtatcatcaagttcattagagaatgttaataattcatgataactttcttcttcattgacatcatttttaaaatagaaaacatgttctatgaattcatcgagtcgatcagtatctttgacgtgcgtttgaatagattgtttaacttgttcacggaaaaagtcgttagtataatctcttcgaccaacgccaataatggcaatatggtcatctaaattatcttgttgatataaatggaataaagaagggaataattttctatgactcaaatctccagttgcgccaaatatagtaattaaacaagggatatgtttagtgtgtgtgttcaaattcaaaacctcaattctttaattgctatgattaattcattataaattaaaactgtttttcttgatatgtttttgcctaaaattgttgataatatttacaacattaaactaaataacatacaatttattttttataagttacattataccctaaattctgataaattcatttattttatttcatatgataacaaacttatagacgtatgataaaatatattattgaagaaagaggaggcaaatgcatggaagttacattttttggaacgagtgcgggtttacctactaaagatcgtaatactcaagcgattgctttaaatttagaaccttattcaaattcagtatggttattcgatgtaggagaggggactcaacatcaaattttgcatcactcaataaaattaggcaaagttgatcatatttttattacgcatatgcatggcgaccacatttttggattacctggattattaacaagtcgttcattccaaggtggagaagataagccattgacgttaatagggccaacaggtttacaacaatttattgaaactgctttgaaattatctgaatctcatttaaactatcctattacatatattgaaattgataataattttacatatcatcatcatggttttacagtttcatcaaggttattaaatcatggtataccttcatatggttatcgaattgaggctcctacaacaccaggtacaattgatgtaactgcattaaaggcaattggactagaaccgggtcctaaatatcaagaagtaaaaatgtttgatacttttgaatataataatcaaatttatctttctaaagactttaaaggtccagccaaaccaggacctattgttactatttttggagatacgaaaccgtgtgacaacgaatatatacttgcagaaaatgcggatattatgattcatgaagcaacatatattgaaggtgacaaaattttagcaaataactatcatcatagtcacattgatgatgtatttaggttaattcatcagtctaatgtgaagaaaagttttattacccacctaagtaatcgatataatttagaagatatagaagagataaaccgtgcattaaaagaaatgaaagatacaccaaactttgagtttgttaaagacttcgatacattcaaattttaaataatattagcgttttataatgatacgtaaaaactcataaaaagctataacgatatgtatgacttaattttcgttatagctttttttattactcatcttcacttttagaaagggcaatacttctatgaactgccgcgtctagacaggctttaaaaatactctcaatatcatgtcgatcaagttcatttaatccagcttgtgttgtaccacctttagaggtaatattttttctaagttgttccatacttaaatccgatcgttcaatcatcttacttgttccaataatgagattcttaatggattcttcaacttgtttcttttcaagacctaatgatgttcctgctttaacatattgttcaaatacgtgatataaaaaagctggtccgcttcctgtaatagccgtcacttgatgtaaatattcttcgtcaacttcaataactgagccaaaagcactaattaattctgttacttcatctttagaatgaggatcgaaattaccagaaaaactaatacctgtcactgaatgacctacctgtgcatttgtattaggcataattctagcaacaggattattcgtttctaacttttctcggatataatttatcgataaaccagccataatagatataaaacgatggtctgattgtatatgtgatttaatacgtgatgcgaccgtttcaaaatcatgaggtttagtacctaaaaaaacataatctgcatcttttaataaaaatgcatcatcgtaactgtattttactcctaattctttcgcaaataattttaaagtattctcatttgatttatttgttaaataaatatcgttatgatttaatattttagaatcaataattcctttaaaaatggcttgtgccatgttaccagcgccataaaatactaacttcataaaatagcaccatccttacccttaattgataaaactatagtaacatattcattataattattatcaaaaattaactatacttgttagataggagagactcatcagtgattgtaggtaaacatttcatcgtaactggaggaactagtggcttaggtttagaaataacgaaaaaattattaaaaaaaggtgcatatattaccctcattgttcgtagtacggagaaattcgaaaatattaattttaatccgtacaaacatcgtgtttcaatgattaaatgtaatttacaagatacttcacaaatagatactatttctaaatccctttgttatccgattgacggaattatttatagtgcaggtttaggcttttttaaatcaatacaatctcattcgttagaagaaaccttggagacttatgatgtgaatgtgcttggttttattacattatttaaaactgttaaaccatatttaacaatgaatgcttctatagtggctatttcaattcaggcagcatttgtaacgcaagcgaacgctgcattttatggctcatctaaagctgctttaaatggcgtattaaatgctctaagaattgaggagcaaggctttcatgttatgactgttaatccaggtcccattaatacaccatttcacaaaaaagcagatccatcattgaagtacgctaataaatatgcatcactaatgatagatcctaaaatactcgcagaagatatcgttaaaggtatcatcactcgtaaagtagaaattaacaagccgctatggatgaatccactattaaaactttaccaattagctcctagaaaaattgaaaaatattttacttcattgtttaaaaataaaatataatttaacctaaaaaaatgatgaagcattcatcatagatacttcatcacttgtactttacatcaacgattgtttataagaatttattaattaattactcaagatgctgagtatattctaaatctttcacgcggtgacgtgcagatttaatttgatccaaacttactgttttattaaaattagtaatattatcttttaattgtgaaacagaacttgcaccaacaataatagatcctaatgcatcatgggattttaaatattcgaatgataaagcacttaaattactttcaacttccttaacagaagcaatcgtttctcctaattcatgataattatagtcaaaaataccatctgagaatttctgatcaagtacattaacactatttgaagtaagtaaccctttaaacacgggaccacgtgctaaaacttttacaccatgagaatgaatgtgattcaaaagacgttctggacgattatcaataagattaaattgagacataatcgtttctatttgactatgttttaaataatactcaatcacgttaggtctaatagaagaaattccataagctttgattacaccttcttttttcagttcatcgaatgcactaatcgtctcatctaggggatcatcaattgtaccaccgtgaagttgataaagatctaactgttctaaacctaaacgttttaaagaacttttaacactttctttaatatatttttttgaaggatcccaagtagtactaccatcattaagcggtctatttcctacttttgttcctataacaatatcatctctattttgatatttctttaaagactttccaacaatgtcttcattgacacctctatcataaatatctgcggtatcaaaatatgtgataccattttcaattgcacactcaatgatttcctctgcgtgatggtattctgtgcctaaactcatacaccctaaacctagttccgaaatttcaatgccactttttaatatatttttttgcatgaacaatctccttccgatacactttagttaacgcatttatcttatcaatttattaacttaatgaaaagggacgtggatataatggactttaatgaaaaaacttttgatagaacagtcatttataatggtaaaattatcgatctagaactacacgatgtggagttaccagacgggaaaacttccaagagagaaattatcaagcataatggtgctgtggcaatttgcgctattactccagaaaaagaagtattattggttaaacaatatcgtaaacctattgaaaaacccttgttagaaattccagcaggtaaactagaagaagatgaagaaagagaagaagcagctaaacgcgaattagaagaagaaactggctacaaagctaatcatctaacattcatcactcatatgtatggttctccaggattttcaaatgagaaactaaccatttattttactgataatttaagtgaaggagaattgaatctggatgatgacgaatttgtagaattgcataaaatacacttagatgatatccatgcacttttagaaaatcatgaaattgaagatgcgaaaacaatgattgctttacaatatgtattattaaattataatcattctaaataagacgtgataactacttgatttttactaaatttattggtaatttattaattgaaataatttaatttaaaatgattataattaattgaggagtgatgctcccgtggaagaacgtctaaatagagtaaaacaacaattacagcaatcttcttacaaattaacgcctcaacgcgaagcaacagttcgtgtgttaattgaaaatgaaaaagatcatctaagtgctgaagacgtatatttaaaggtaaaagataaagcacctgaaataggtttagctactgtttatcgaactttagaactacttgctgaattaaaagtagtagataaaattaattttggtgatggcgtagcacgatttgatttgagaaaagaaggtgctaaacattttcatcatcacttagtttgtatggaatgtggtaaggtagaggaaattcatgaagatttattaccaaaagtggaagaacgtgttgaatcagaatatcaatttaaaattttggatcatcgcttaacatttcacggtatatgttcagaatgtcaagctaaaggtaaataataagttaaacctaataaagtgttgtatcaactttatatgcaaatgcctagaagagcttttcaagataaaaaaaagtgatatgtaataattaatcgatagaaggtgtgaaattaagaatcaactttgaattctatttcataccttttttatataaacagaggtgtaatatgaatacgattattgaagaattcttaaaatttattcaaattgaaaagggattgagtgacaatactatcggcgcatatcgacgcgatttagctaaatatgaagagtacatgaaagaacgtaaaattgctcatatcgattttattgatcgccaagtcatacaagaatgcttaggatatttaatagaccaaggtgcttcagctaaatcaatggcgcgttttatctctacaattcgcaattttcatcaatttgcacttagagaaaaatatgccgctaaagatccaacagtcttaattgaaactccgaaatatgagaagaagttacccgatgttttagaagttgaggaagtacttcaacttttagaaacaccggacttaaataagaaaaatgggtatcgtgatcgtacaatattagaattattatatgcgactggcatgcgtgtttcggaactgatacaaattaatattgaggatatcaatcttattatgggatttgttagagtatttggtaaaggtaataaagaacgaattataccattaggagacactgtgattgaatttctagatacgtatttagaaaaggtacgtcctcaacttttgaaaaagactattacgaatgtattatttttaaatatgcacggtagacctttaactagacaaggaatatggaaaatgattaaacaatatggtttgaaggccaatattaataaaactttaacccctcatacgttgagacattcatttgctacacatcttttagaaaatggggcagatctaagagcagttcaagaaatgcttggtcattcagatatttcaacgacacaactttatacacatgtgtctaaatcccaaataagacaaatgtataatcaatttcatcctagagcttaaaataaaagaaagaaaagtgaattatttaacttttctttcttttatttttaagtgctttttttctagctgcaatgatatcgcttctatctcttagacgatgacaatgaacaatcatgtcatcattgttaatttgtttcttatattcataattaggatataaattgataagttccctttctattgaagatgtaattggcaactgtattggttgaaatgtctgatcatgtttcactttttctatttgattttgaatcaataaagtaaattcattgacctttaaacctagtgtatccttatcctttgcatgcttaaatgtatataacgcttttttaaagctttttaatgcacctaacttattacatcgtctatagtgatacatggcagttgaaaatagtattaaactcactatagcatctttcttagaaaaattagggttagacttccataattcttctaaaatatcatgacataaaaaataatgttggtgtgtatgaaattgatagtagaattgacttaatgctttattcatgaatactcccccttaatttaattctaatatatattcatgctataatatttaggtgaattatgcacaatttagattttataatacaaggaagttaatttatgtacgaagttaaattagatgcttttaatggcccattagatttacttcttcatttaattcataaatatgaaatagatatttatgatataccaatgaaagctttaactgaacaatatatgcaatatgttcatgcaatgaaagaagttgaaattaatattgcaagtgaatatttagtgatggcttcagaattattaatgataaaaagtagattattattgccacaacaagaaactgaaaatgacttagaagaagatcctcgtgaggaccttgtaggtcgtttaatcgaatatcaaaattataaagaatattctttactattaacagaattaaaaaaagaacgagaattatattatactaaatcaccagctgatttatctcacttggaaaaagaaacgcattgggacaaaaatcaaacgattgatttgactcaactgattgttgcataccaaagagtaaaaaatagagtagcattaaatacgccaaaagcagttgaaatttcaaaagatacttttacaattcaacaagctactgaagtggttgctaaacatttagagaaacaaacagcatttaacttctttagtttatttaactttaatgaacctgtgagtaaagtcgttacacatttcttagcaatattagaaatggctaaagcaggtcttattaatatagaacagtcaaataactttgaagacatcaatatcattagaggagtgaactatgcgattggataaccttggaattatagagtccttattatttactgtaggcgatgaaggactggaagcacgtcagcttgcagatattttaaaaatggatttagatgaacttgatcaattaatttcgacgtatcattcaaaaggtcttgaaatacaaaggtatggttccatttatatgttaacctccaaaaaagagtgtgcaccttttatcgaagtactagtgaagcaaaaagcaaacatgaaattatctcaagctgctatggagacactatcaattattgcttataatcaaccattaactagaagtgatatcgaaataacaagaggtatcaattctgatggtgcagtgagaacattaattgctagaggacttattgaagcaaaagacatggagaattcgcggagtcatttactcatgactactgatttatttttaaatgtttttggaatgaaatcaatagaagaattaccatctactgaagaagataacgaagagattgagaatttctttagtacacttacaaatcaaaaggagaaataaaatgaataaagatttagaaagacttcaaaaacgaattgctaacagtggatatacctctcgaagaaaggcagaaactttaatcactgaaggtaaagtgaaagtaaatggtcaagtagttacagaacttggaacgaaagttaaatcttcagacactgttgaagttgaaggaattaaaattgagcaagaagataaaatttatattctgttctataaaccaacgcaagttattactagtgtttcagatgatagaggtagaacggttgtaacagattattttaaagatttagaagcaagaatttatccagttggacgattagactatgatacttcagggttattattacttacaaatgatggtgaatttactaacctaatgactcatcccagatatcatattcaaaaaaaatatgttgcaaaattaaaagggtatttaatgagagaagaagttaaatcattagaacaaggaattgaattagaggatggttttacacaacctgctcaagttaaaataaaaaatcaaaataaagaaaaaaatacgacactggttgaaataactattagcgaaggtagaaatagacaagttcgacgtatgttcgaacattttaatcacaccgtcgataaattaatacgaatcgaatttggaaatcttaatttaaaaggattaaatgcaggtgaaggtagagtattaacacctcatgaggtgaaaatattaagacatatggctgaaaatggtaattaattcgaaataacttaacaatacaaagtatattctcaattacaatgtgtattctttttttatttattcactgtaataataaatcataggttctacattaaaaaagatattttgatatttttttcacaaagtcaattgaatagaaagctttaatatagtgaatatgctataattaaaacggtatagagcatgtgtaggaggtatattgtaatgacgaatgaaatattaattgtagacgatgaagatagaatcagaagattattaaaactttacttagaaagagaatcgtttactatccatgaagcaagtgatggtaaagaagcatatgaacttgctatggaaaatgactatgcgtgcattcttttagatttaatgttgcctgaaatggatggtattgaaatgtcgtcaaaattacgtgagcataaagatacgcctattattatgcttacagctaagggcgaagaaactaatcgtgtggaagggttcgaatcaggtgcagatgattatatagtgaagcctttctctccccgagaagtcgtattaagagtgaaagcattactacgtagaactcaaacatctaaaccagaacaaagcgaaccacatgcaagagatgtcattgagtttaatcatcttattatcgataatgatgcgcatcgtgtattagcggatcaacaacaagtgaatttaactccaaaagaatatgagttattaatatacttagcaaaaacacctaataaagtatttgatcgtgaacaactattaaaagaagtttggcattatgaattttatggtgatttaagaactgtagacacacatgttaaacgattaagagaaaaattaaatcgagtttctgaagaagcagcacatatgattcaaaccgtttggggtgtcggttacaaatttgaggtcaatacaaatgatgaatcgtctaaatagtgttgttataaaactgtggttaactataatatttatagtaacgacagttttaattttattaagtgcagcattaattacatttattcaatattattacacccaacaaacagaaaatgctataagagaagatgcttcaagaattagtcaccttgttgaaaaagctgataacaagtcacttgccatacaacatagtcaggaattgattgatggcacaggtggcgttattattatgtctaataaaaatatgtcagcagaaaaatcatataatttgattaaaaaaagaatgttaaaagaaattcaaaacaacgacaactttaataaagtatttaatacagggaaatctgccacacaaaatgtcacaataagtgaaaaagggacatcccattcttatattcttttaggatatccgatgcaatctcaagatcgtaagcatgctaagtttagcggagtatttatatatcaagatttaaaaacaattgaagatactaataatgcaattaccattattattttaattactgctattgtattttttattgtttcaacgatttttgcgttctttttatctaatcgtattactaaaccacttagaaaattaagtacacaggcaattaatgtatcgaatggagattactctcaaaaaacaaccgtaaatacgaaagatgaaattggtgaactttcttatacttttaataatatgagttataaaattcaagagcacattgaagctttatctactcaaaaaaatattcgtgatcgtttatttaattctatgattgaaggtgtagtgggtttaaatgataaaagtgaaattattttatctaacaaaatggcagaccaaatactaccgacaattgataaatctatttattcagaaattaaaaatcaaattaatgccacgtttcattcaaaaggcacagagtttaatgaatatgcaataaactctaagtattatgtatttataatgagttatattgatcgtattcaacaagatggtcgtagtggaattgtaatcatcataagagatatgacaaatgaacataatcttgatcaaatgaaaaaagattttatcgcaaacgtatcccatgaactccgtacaccgatttcgttattacaaggttatactgaatcgatagttgatggcattgtaacagaacctaacgaaatcaaagaatcactatcaattgtattagatgaaacaaaacgacttaatcgccttgtcaacgagcttttaaatgttgcaagaatggatgcggaaggattaaccattaataaagaaatacagcccataatgccattattacgcaaaatacaacttaaataccgtcaacaagcacaagatttagaactaaacatagacttgttaccaaatattaatgaagatgatttatggaattacgatgctgatcgaattgatcaagtactcacaaacttaattgataatgcaacacgctatacacaccctggagattcaattacgattactgctaataaagatagtcagtatcaaattttaaatataaacgacacaggtagcggtattgctcctgaacatcttgatcatgtatttgatcgtttttataaagtagaagcttctagaactaggggtaaacaaggaactggtttaggattatttattagtaagatgattattcaagagcatggcggaattatttctgtagaaagtacagtgaataaaggcacaacctttattattaaattacctaaaccttctatagattctaaataattaactttcaacaaaataggattaaatatccaaattttttgagattatgttcttcaaagttaaagataaaactttgaagagcatttttatatctatagttttttaaatataatatttcatgtcatattaatttaaaatcagtcgatgaaactgatgaaacatatctctcatttttataaataaacagacacattgcaatgaaagatttattcgtgtaatataaattttaaatgataaattcaataattcatcttcggggtagggtgtaattcccaaccggcagtaatttgagcctgcgacccgcttcaataaaagtggctgattcagtgtaaatctgaagccgacagtatagtctggatgggagaaggtggaggttttttgttgtgtaaacgtatcctccaattcttagtaagatgaatggaaggagaaaactgaatatgcaacaaaataaacgtttaattaccataagtatgttgagtgcaattgcattcatattaacatttttgaaatttccgttaccatttttgcctccatacttaacattagattttagtgatgtaccgactttattagctacttttatttttggtcctttatctggtcttcttgtagcattaattaaaaatatattaaatttcttatttaatattggcgatcctgttgggcctgtggcaaattttttagctggagctagttttttactaacagcttattttgttagtcatcgtaaacaatattcatctcgtcgttcactaattataggattagttgccggtactattgcaatgactatcgttttaagtattttaaattattttgtcttactacctttatatggtatgatatttaatcttggtgatgtgtttactaatttaatagtaatcattttatctggtattattccttttaatattattaaaggatgtgtcatatcaatcatttttatcttgctatatcgccgtttaaaaaaagtattgaaataaaattaaaacctccgatgacttctaagtaggaatcattggaggttttatattataattatggtaatacaattttatttacagatttattcaaattttaaggcatctccatcaaaaggctcttcttcaattttaattgaatcagttggacagccttcaagagcatcttccatatcttcatataattcttctggtacttctgcagtaccttgattatcgtcaaggattacgaaagcaataccttcgtcatcataatcgtaaatatctggtgcagcagcgccacaagcaccacaagcaatacatgtatccatatcaacgattgtgtactttgccattttattcgcctcctttgataaaaatgctacactagtcataataaataattttattatattctagatataaaagttctataaaagaggagttcactcatgcaagaaatgattagttatgttaaacatcactcattcaattataaaactaataaaagtatatataatattttaagtggaaaaaagtcacatcaaacgttttttgatgcgagctctcaacaacttttatcattatatcatagtttacctaaattaaaatatcagacatttgaacgacttttgaataaaaatgatataaaagaattaaatatcaaggtgcatcctcggttcacttatgacagtcttaataatacttttaaatgtattcaattattaattcagacgatatctcaatatctccatcatcaacttaaattcgtaccaatgaaccaacaagttattattcaaaataaagttaaaaagatttatggaactattattaaaaatgatttaataaaagattttgaaaatgaagtgactgatttatttcaagcaatcagtttaaataataataataagtgctaccttcattattatttgcatggttatgatgagcctatgtatacaagacaacaggtaagtttgattgagaatatttctatttcaaaattatatacattagaattgaataatttagtcaccttaggaagtgaaattgaaaataaacaacgttatcctatattgtctgaatgtattattctttcatcattattaaataaaacatctattactcaacaatatcttcatcaaggtttgagtttaaatgaaattgcaattgcacagaatgttaaactcaatacaatagaagatcatattttagaattatttattaaaggctatgagaaaaattacgaaaattacgtagagaaaaaagatgtttttcaatttactcaatactatacagagcataaaggagaaagattaaaaatatataaacaagagtttgaccatttatcatactttgaaattaaactcatgattgttgggatagaaagaggtgaaatcaatgttagagaacaatcttaaacaatggtttggacatgaaagttttcacccaggtcagaaagaagttatagaaagtgtgttacaaggcaatcatacacttggtgttttgccaacaggtagtgggaaaagtctgtgttaccaatttccaacttatatgcaacaaaaacctactcttattatttcaccgctaatttctttaatggacgatcaagtgatacaacttaaatctcaaggtgaacgaaaggttgtatgtattcattcaggtatggatgaacaagaaaagaaggaaaatatcaatttattaaatcaaagtcgttttatatttctaagtcctgaatttattcttcaatctcatcatttcaatttaattaaaaacatcccatttggtttagtagtattagatgaagcgcattgcttatcagaatggggatatgatttcagaccgcattacgcacttatcggtcaaatcactcatcattttaaattagcgactattttagcattaactgctactgcaccgccacatttaacaagtgatttagaacatattttaaaagttaaattaaacactatacaaactactatgaatcgtaaaaatatttcgttatcacattttaatttcaaggatgacgacgaaaaaatagaatggttattgaaatttattgaatcttcaggtcccacaattatttatgtatcatctaagaaaatatgcttacaactcgcaaaactcatttatcaacatggatatttaactggtatttatcatggggatttaacttatcaagaacgtcaaactgttcaaaatcaatttattaataattttattccagttattgtagctactagtgcttttggaatgggggttaataaaaaagacattcggactgtgattcattttcatttatcatctagtccttcaaattatttacaagaaattggaagagctgggagagatggaaaacaaagtcaagcgattagtctatatcaaccagacgatgcttatattctagagacgttactatttaatgatgctatcgtaacagaagatgtcgaaacttttgagctaggcgcattccttccacctaataaagaagaaattttaacagtattacaccaaaattatacatttaaagaattgaaacacatttttaaaacctcatatatacgtaaacaagctggttatcaaagaattataggttatactcgtatagatcaatgtagaagaaaatttttattggaattttttggagaatctcctaatcaacctaatgaatgttgtgacaatgattcagatttaagtaaaattgagtgttacaacagaaaaaaagttaaaagacaatttactttcaatgaaaaaattaaaaacttatttagagtttagtgactttactttactaaaatattttatacaggatataattaaattacatagtgatttataagaaatttaaaaatgatacatatttatgcattacttgggtataaataatgtgacaattaaaataagaaaaagagaggatgttgactatgtctagagataattttaaggatgattttgaaaaaaatcgacaatcgatagattcaaacgatcaattcgatcgtgtaaataatgaaactaacgatgaaatagacaattttaacaatgaaaccgatcaacagtttccaccaagaaatgcacaaagacgacaaagaagaagaaaccaatcttctagtcgtaacaaaaaatttaacgatcaggttaatgattatgaagaaggttcattagatgaccgttatgatgaggagacatttgacaaagtacataacgataataattctcatcataatcacgagaatgatgagaataatcaacgttccgatgtagatgagcgttatgatgaacataatcgtcattctaatcatcgtcttgaggacgatagttatgaaaatgatgataatagtgatgatagaatgaatagtgatcatcgtcgtcatcgtgattttgatcaagataacgatagacatgaagctcatcattcaaaaatcggaaaagacgcaacaattgctggaggagctgctgctacaggagctgttggagcaaaagcatcacgtaataaaaaacgtaaaaataatcgtcatgatgatgaaaattatagagataatgaaaatagaagtgttcaacataacagcgaagataataatgaactagataataaacatcacagaaaaaaaggtaataaaggcaaaaaagctgctgcagtcggtgctggcgcagctggagcaggtgctgctggtgctgccgcttctaaacataaacaacatgatgaacataacaatctaaatcatcatgatgctgataaacatcgtgaatacgaagataatgatggtttccaagcacataacggtaataaaaaacgtggtttaatgggaattttacttccactcatagctttattacttattttagctgctctagctatttttattggcatgtatcttaacaatgaccataaagaaaaaaacaataacactgcagataataaaacagaacaaactgagaacaaagataacgctaaagacaaagctacaaatgaaaaagaccaatcaaatgaaaaagtagcaacaaaagaagataaatcaagcgaatcagataatagcactaaaaaagatagtaatgagtcaaatgaagtagctacaacagaaaacagtacatcaaacaataataatgataaaaattctactgaaagtgcaacatctgaaaatgataacaataaatcaaatgtatataacaattcatcaagttcagacaataactcaaattctcaatcaactcaaaatagcacacaatcaagtaatagtgctggccaacaaactcacgtagtatctggtaatgataatttatatcgtattgcaattcaatactatggtgaaggtacagttgaaaatgtaaataaattaaaacgagctaacggcttaactagtaataatattgtaaatggtcaaaaattagttattcctcaataatatctgaatgtattaaaaaaggtacacctaaaatggtgtatcttttttatgttcatttgaagataagtaaataacaatgtaaatatttttatttagaaatatatctgtaaactgatataatatgttagtgattaaaggaggccattaaacatgcaaacaattgaaagtattattattggtggaggcccatgtggtttaagtgcagcaattgagcaaaagaaaaaaggcatagaaacactagtaattgaaaaaggtaacattgtagatgccatttatcattatcctacgcatcaaacttttttctcttctagcgataaattaagtattggagatgtgccatttattgtagaggaaagtaaacctcgtcgtaaccaagcacttgtctattatagagaagtagtaagatttcatcagttgaatgtacatccttttgaggaagtattaacagttaaaaaaattggaaataaatttacaattacaacaactaaagacgtgtatgaatgtaaatttttaacagttgcgactggttattatggtcaacataatactttagatgttaaaggtgcggatttatctaaggttaaacattactttaaagaagctcatccatacttcaatcaagatgtcgtggttattggaggtaagaattctgcagtagatgcagctttggaattggaaaaggctggggcaaatgtgactgtattgtatcgtggagatcgatattcagcagcaattaaaccttggattttgccaaactttgaatctttagttaaccatgaaaaaatcgatatggaatttgatgcaaatgttactgaaatcactcaacattcagtaacttatgaaaaaaatggtgaaacagtaacaataccaaatgactttgtttttgcaatgattggttatcatccagactatgagtttttacaatctattggtatagatattcatactaatgaatttggaacagctccaatttataataaagaaacgtatgaaacaaatgtggaaaactgttatattgctggtgttatagcagctggtaatgataataattcaattttcattgaaaacggtaaatatcatggtggtattatcgctcaaagtattttaagaaaaaaacaaactccactagaaagttaaatttcatttattttaattaaaagagagaaacaatgagtgcatcatcattgtttctctcttttttaagtttcaaagtattctttcaattccttatgattcatatggttacttaaaccaattaaaagttttaatcttgctttagggccatttaatccgttagaaaaaataagaccctcttcagctaatcgaaaacctccaccttcataatcatatactggacttacaatgccattaaatgagcgagacacgagtacgataggaatatcttttttgacacatgattcaatacctttcaaacaacttggaggtaagttaccttggcctaacgcttcaataattataccttgaacgttttgttgagcataaaattctaaaacatcattagtcattcccatatacgctttaattaatggcacatttaaactttcatctattcttggaaatactttttgtcgatatggacgattataaaattgaacacgatctttagttaagatacctaaagggccttgattaggactctgaaaggtattgatattcgaggtatgtgttttagtaacatttctcgcagtatgtatttcgtcattaaatacgaccatcacgcctttatcagaagcttctaatgaagttgcaactctaattgctgagataaagttatatagcccatctgaaccaatctcgtttgatgaacgcattgcacctgttataacaataggttgacttatatcgattgttaaatcgagcaaataagctgtttcttctaacgtatctgtgccatgtgtaatcacacatccatcataatgattcttagaaaattccttcataatgatatcttttaactttatgacatgagaaagtgtgatatgtggtgatggcacattaaagggacttatttcatatacatttgcatattgatctatgatgtttttatgcaatgaaataggattgatatcatttgtaacgacctgattgagttgattttgagacatactaattgttccacctgtatgaataacaagtatctttttcattaaactcctcctatttttaaaatatatatttatgataaaataatacagataaaacaacaagaaaggaaaaatgttatgaatccaattaatattgcattagatggtcctgctgctgctgggaaaagtacaattgcaagacaagtagctagtaaattatcaatgatttatgtcgatactggtgcaatgtatcgtgcaataacgtataaatatttaaagcaagatgctcctgaagattttcaaaatttaattaatcatacttctttagaattaacttacaatccatcaaaaggccaacgaattattttagataacgaggatgtgacagactatttaagagaaaatgatgtcacacaacatgtttcatatgttgcatcaaaagaacctgtacgcacctacgccgtacaaaaacaaaaagaattagcaataaaaaaaggaattgttatggacggtagagatattggtaccgtcgttcttccagatgctgagttaaaagtatatatgattgcctctgtagatgaaagagcggaaagaagacaaaaagagaatgaattacgtggcattccttccactttaaatcaattaaaaaaagagattgaagaaagagatcattacgatatgaatcgtgatatttcacctttaagaaaagcggaagatgctataacagtggatacaacgagtaaaactatagaagacgtaactgaagaaatattaaagttagtaaagaatctgtaattttcatacatagctatttaatttaattcgtcaaatgactaaagtataagcgaattattttaaatagctattttagttatatataattaattatgaaaatataaacaataaattttcttagtcttatattcaatcataagtttcgatttttatcgatattaataaatatatttttctattgcttaatattaaataattttaaaaaatgatatattttttaaaaacttatgaaactaaaggggtatttcttgacaattcctcgtgtttataagatgttatagttatgtagtgtataaggaggcaaacatgatgactgaagaattcaatgaatcaatgattaatgatattaaagaaggtgacaaagtcactggaaaagttcaacaagttgaagataaacaagtagtagttcatattgatggggctaaatataacggaattattccaattagccaactttcaactcatcacattgaaaatccaagtgagattatttcagagggtgatgaaattgaagcatatgtaaccaaaattgaaattgacgaagaaaatgaatcaggcgcttacattttatcaaaacgtcaacttgaaaccgaaaaatcatatgaatatttacaagaaaagcttgataatgacgaagtaatcgaagctaaagttactgaagtagttaaaggtggcttagttgtggatgtgggccaaagaggattcgttcctgcgtcactcatttcaactgatttcattgaagatttctctgtatttgaaggacaaaccattcgtcttaaagtagaagaattagatcctgaaaataatagagtcattttaagccgtaaagcagttgaacaagctgaaaatgacgttaaaaaagcatcgttattagattcacttaatgaaggagacgttatcaaaggaaaagttgcacgtcttactaactttggtgcttttgtagatattggtggcgttgatggattagttcacgtatcagaattatcacatgagcatgttcaatctcctgaagacgtggtaagtgttggacaagaagtagacgttaaagttaaatctgttgaaaaagattctgaacgtatttctttatctattaaagatactttaccaactccattcgaaaatattaaaggtaaattccacgaaaacgacgttatcgaaggtaaagtaattcgcttggctaactttggtgcttttgtggaaattgctcctggtgttcaaggacttgtacacatttcagaaattgctcataaacatattggtacaccaagtgaagtgttagaaccaggacaacaagtgagcgttaaaattttaggtattgatgaagaaaatgagcgtatttctttatctattaaagctacattaccaaatgaagatgtgattgaaagtgacgaagctacaactcaatcatatttatctaatgaaacagatgaagacaatccaactttaggtgacgtttttggtgataaatttaaaaacttaaaattctaatattaaatattttattatttaatttaatgatgagagcaagaaaagatattcaaatagaattctttcttgctctttttttatttatctttactcactatctatcgtatgacaatatatacttgtttttaaatcatcattgcgtatgataaaattatagagattttagaaagagaggaagttagcttatgactaaacctattgtagcaattttaggtagacctaatgtggggaagtctacaatttttaatagagtagtaggtgaacgtgtatcaattgttgaagatactccaggtgttacgcgtgatcgtatttattcttcaggcgaatggttaacacatgaatttaatatcattgatactggaggcatcgaaatcggagatgcacctttccaaacacaaataagagctcaagcagaaatcgctattgatgaagcagacgttattatctttatggtaaatgtgagggaaggtctcactcaaagtgatgaaatggtggctcaattactttataaatcaaaaaaacctgttgttttagcagtaaataaagtagataatcctgaaatgagaagtgatatttttgatttttactctttaggttttggcgatccttatccaatttctggttcacatggtttaggtctaggtgatttattagatgaagtcgttaaacattttaaagaagaagatagtgatccatatgatgatgacactattcgtttatctattattggccgtccaaatgtgggtaaatctagtttagtaaatgccattttaggtgaagaacgtgttattgtatcaaatgtagcaggtacaactcgagatgctgtagatactgagtatagctatgatggacaagattacgtgttaatagatacagcaggtatgagaaaaaaaggtaaagtatatgagtcaactgagaaatactctgtattaagagccttaaaagcaattgagcgttcaaatgtggtgttattagttattgatgccgaagaaggaattattgaacaagataagcgcgttgctggatatgctcatgaagaaggaaaagcaatggtgattgttgtaaataaatgggatgctgtagaaaaagatactaataccatgaaaaaatttgctgatgatgtacgtaatcaatttcaatttttagattatgcacctatcgctttcgtatcggcaaaagagcgactacgattaaaaacacttttcccttatataagagaagcaagtgaaaatcacaaaaaacgtgttcaaagctcaacacttaacgaggtggtgacggatgcaatttcaatgaatcctacacctacagataaaggtagacgtttaaatgtcttctatactactcaagtggctattgaaccaccaacatttgtggtttttgtaaatgatgttgagttaatgcatttttcttataaacgctatcttgaaaatcaaattagagatgcatttggttttgaaggaacgcctattcatatcatccctagaagaagaaactaagaggagagattaagatgactaagattacagtttttggtacaggaagttttggtactgcattagcaaatgttttagcagagaatggccattcagttttaatgtggggaaaaaatgaaaatactgtagatgaaattaatcaatctcatcaaaataaacggtacctgaaagacgtaacattaattgaaacaattaaagcaacaaatcaattagaacaagcagttaatttttcagatatatttttaattgctttacctacaaaagcaattagagacgttgtgactgaaattaatcaacatattaaaactaaaaaaacatttattcacgttgcaaaaggtattgaaaatgaaacatttaaacgtgtatcagaaatgattgaagattcagtatctaagaaccataaaaatggtgtgggggtactatctggaccaagtcatgctgaagaagttgtaattaaacaacctacaactgttgcagcttcgtcaaaagatgaacgtataagtaaacttattcaagatttattcatgaatgattacttacgagtatatactaataatgatttgataggtgtagaactaggtggtgcacttaaaaacattattgctgtagcaagtggtattgttgctggaatgggttatggtgataatgctaaagctgctttaatgacaagaggtttagctgagattagtcgactaggtgaaaagctaggggctgatcctatgacttttctaggtcttggtggcattggtgatttaattgtaacgtgtacgtctactcattcaagaaattatactttaggatataaattaggaaaaggtaaaacgactgaagaagcacttaacgaaatgaatatggttgttgaaggaatttatacaacaaattcagtatatcatttagcaaaagctcaaaatgttgatatgccaataaccaatgctttatacaaaatattatttgaagataaaccagtgaaagatagtgtgaaggatttaatgggacgagataaaaaagctgaataaagtgtaattttgctatttaacgcaaatattttataaaattattcacgaaatactgataattcaacgttttaagtatataaatcgttgcggtaaagggaattattgtgttaaagtcataccataatgatataaatttatcattatcattcatctggaggtgaactcataatgaataaaactgacttaatcaatgcggttgcagaacaagctgatttaactaaaaaagaagctggttcagcagtagacgctgttttcgaatcaattcaaaactcactttctaaaggtgaaaaagttcaattaattggtttcggaaacttcgaggtacgtgaacgtgctgcacgtaaaggacgtaaccctcaaacaggtaaagaaatcgaaattcctgcaagtaaagttccagcattcaaagctggtaaagcattaaaagatgctgtaaaataatttacttaaaaagccctataagggctttttattttatatattgtttaattctaaatacatatgttttatttataattgtacaattcactgtgaagcgtctgtgaagttattttcgtcataagcactatattttatttttatgaatataatgttaatatgtatattgatactaacgtgaggtgtgaacatggaaagaacattaagcaaattaaatagacaaattactcaaaggcttaaaggaattaatgaatatgaagcaattcacattaataaaggattaagtgatgttttagatcattttaatattccagaaaatgctaaacttgcctgcctcactattgatacttcaatgaagcatctagatgatatttctaaaaataaattatctaagaaatcaattctaattggtgacttattaagtgctcatttttatactttaatatctgaaattggtgatgtgtcatatcaaaagctaatgagtgaagcgattataaaatctaatgagcttaaaacttcattgcatcatcattcactcgagcgtcatgatatatataaggctgtgttagatatagaaacacttttcccttttataactatttctcattttacagatattgagatttctcaatatgaaatatttgaaaaattatttagtggggtacatcaatattatccctcttatttaagtgaatatgatgaagatgaaataaaccaatttattaaacatataaagcaaagcgataaagagaaaagtagaggtaataattaatgactgaaaataatgcaaaaaaagaacaagttcatacggtttttcaaaatatttctaaaaaatatgatcgattgaacaatataataagcttcgaacaacataaaatatggcgtaaacatgtaatgaaagatatgaatgtgttacctggaagtaaagcacttgatgtatgttgtggtacagcagattggactattgctttaagtagagcagtaggacctaatggagaagttacaggtttagatttcagtgaaaatatgcttgaagttggtaaagaaaaaactaaatcaatgcctaatattcacttagtgcacggcgatgctatgaatttaccatttgaggataaaacattcgattatgtaaccattggtttcggtttaagaaatgtgcctgattatttagcaacattaaaagaattaaatcgcgtattgaaaccaggcggtatgattgtatgtttagaaacaagtcaaccaacattacccgtatttaaacaagtttataaactttactttaaatttgtgatgcctattttcgggaaattgtttgctaaatctagggaagaatatgaatggttacaacaatctacattcaattttccagataaaactaaattaaagcgtttatttgagcaggctggtttcagtcatgtaaaagttcgtagctttacaggtggcgttgctgcaatgcaccttggctataaatagaaagttctactaaataaaaggtgattaatgtggcaaagttaagtatgaatagtgaaattaaaaatgttgaaaagcgtttaaaaaatgctattaaaagtaatgattctgtattacaagaagcagcatttcatttattatcttcgggtggcaaacgagtgcgtccagcatttgttcttcttagtagtcagtttggaccaaagaaaattactgaagatacgtatcatgttgcagtagctttagaattaattcatatggcaacacttgtgcacgatgatgtgattgataaaagtgacaaacgtcgtggtaaattgactattgaaaaaaaatgggatgtcactactgctatcctaactggcaatttcttactagctttaggtttaaaacaactttctaaaattgaagatcatcgtgttcatactattatttctaacgcaattgttgatgtttgtagaggcgagctcttccaattccaagaccaatttaatagtcatcaaaatattacgaactatttgagacgtattaatagaaaaacggcgttgcttattcaactttcaacagaagttggtgcaataacatcacaagctgataatgagacgattcgaaaattaaaaatgattggtcattatattggaatgagttttcaaattgtagatgatattttagattttacaagtactgagaaaaaattaggtaaacctgtgggtagtgacctaatgaatggtcatattacattaccagttttattagagatgaaaaaagacccagttttcaaaaaacaaattgctgagttatcacacctgacaaataaacatcaatttgacccacttattgatcaaatcaagaattcaaatagtatcacacaatctcaagaagtgagcgatcattatttaaataaagcactcgacttaattgatcaattagaggaaccaaattctcaaaatttatttagaaagcttattaaaagaatgcgttctagaaatacataagaatagaaaaaagttgaaaacgctttaataacctgttagtatttagtagtagtaggttgtttgctattaaatgtatttatacatattaaatcaattttttaattagggggatttgtataatggaacgcacttttttaatgattaagccagatgcagtacaacgtaatttaataggagaaattatttctagaattgaaagaaaaggtttaaaaatagttggcggtaaatttataattccaactaaagatactgttaacatacattatgctgaacatacagagaagccgttttttcataaacttgtttcttttttaacttctggacctgtgtttgccatggttgttgaaggagaagacgcagttgcggtatctagacatattatcggaaaaacaaatcccactgaagccgctcccggtactataagaggcgattatggtttaacagtagggagaaatattattcacggatcagactctgtagaatctgctgaaagagaaatcaatttatggtttaatgatgatgaaatatatagctacgaagctaatagagaaaattggctttatgaagaataatttttaaaaagtagaataaattggaatttattttcaattcaaccattgactgccgacatgttagaaagtacctaagacaacagttgtcttaggtacttttttatataaaattatttgaattttcaaacaccaattattctacactagttatgtaatttcattgaatatgatatgataacaaataatacataatactatttaaagtggtaaaggaaaggagctattaatcatgagatatttaacttcaggagaatcacatggtccacaactaaccgtgattattgaaggtgttccagctaacttagaaatgagagctgaggaaataaataaagaaatgtttaagcgtcaaggtggatacggtagaggacgtcgaatgcaaattgaaaaagatgcggtagaaattgtttctggtgtaagaaatggctttactttaggtagtccaattacaattgtagttaaaaatgatgattttactcattggagaaatattatgggtattgaaccaattagtgacgaggcacgtgaaaatatgaaacgtacaattacaaagccaagacctggtcatgcagacttaattggcggaatgaaatataatcatcgtgatttgagaaatgtacttgaacgttcttctgcaagagaaacagctgcacgtgtagctgtaggagcagtgtccaaaattttactttctcaactagacattcatatgtatagtcgtgttgtagaaattggtggaattaaagatgtagggttatacgatacagaaacatttaaacaaaatatcgataaaaatgatgtacgtgtgattgatgaatcgattgctcaaaaaatgagagataaaatcgatgaagctaaaaaggaaggcgactctataggtggcgtagttcaagttatggttgaaaatatgccagttgcagtaggtagctacgtgcattatgatcgtaaactcgatggacgcattgcacaaggtgttgtaagtattaatgccttcaaaggtgtcagctttggcgaagggtttaaagctgctgaaaaacctggaagcgaaattcaagatgaaattttatatcattctgaaagaggttattatagaggatctaatcatttaggtggctttgaaggtggaatgactaatggtatgcctatcattgtaaatggcgttatgaaacctattccaactttatataaacctttaaattcagtagatattaatactaaagaagattttaaagcaactatagaacgttcagatagttgtgcagttccagcagcaagcgttgtttgcgaacatgtcgttgcatttgaagttgctaaagctcttttagaagagttccaatctaatcatatcgatcaacttaaagaacaaattgaagaacgtagaaagttaaatatagaattttaaacatctttaattaacctttagaaatgaggtatatcatgcaattacaaaccacatatcacagtgataattatccaattattgtagaacatcatgcatttaaatatttatccgattatattcaagattacgataaagtattcttaattatagatgaatttgttgattttaattttagagataaatttgaaatattatgtcacaattcaaacattcaaaaagttatcgttcctgccggtgaaaaaatgaaaacgtttaatcgttatcaatctatcatggaacaactactaggaatgaaccttactcgtaatacatgtttagtggctataggtggtggggccacaggagattttacaggattcttagcttctacattattaagaggtgttgattttatacaagtacctacaacgatattagcgcatgactcaagtgtaggaggcaaagttggaataaattcttcccatggtaaaaatcttataggcgcattttatagacctaaagcagtcatatatgatttaaattttttaaaaactttaccttatcatgaaattttaagtggatacgctgaggtatataagcatgctttattgactggcgcagttgctacagaagatattgaaaaacacttttcagataggaaaacacttgaatcacttaaagatatggatcaatttatttttaagggcataaaaacaaaactaaacattattataaaagatgaaaaagaaagtaatgttagaaaatatttaaatttaggtcatacctttggacatgcagtagaatataagtataaaatacctcatggtcatgccattatgattgggatgatttatcagtttattgtggcaaatcatcttcttggcacacaatttgatattcaacattatattaattatatgaatcaattaaattatccgctggatttaattcagcagattgattttgaagaaatgtatcaatatatgttatcagataaaaaaaataatggtgaaggtattcaaatggttctactcgagaaattaggtaaacctaatgtatatcatgtagaaaaaaatatattgaagcaatcatttaaacaactacaattattagtagagtaggtgaaatactgtgacaacaagtcaaacaatagatattcatggtccattaaagggtgagatagaagtacctggagataaatctatgacgcatagagcaattatgctatcgtcactcgctaaaggtaaatcaattattgaacaaccgcttctaggtgaagattgtttacgtacaattgaaatttttaaactcttaggtgttgagattgaaattgaagaacatcgtcttattgttaattctccaggatatcaacatttcaatataccacatcaaacgttatatactggaaattctggtacaacaacgcgcttacttgctggtcttttaagtggattgggcatagagtgtgtcttatctggagatacatcgataggaaaacgacctatggatcgtattttaaaacctttaaaattaatgaatgcaaatattaatggtattgaaaataactatacaccacttattattaagccttcagccattaatggtatcaattatcaaatggaagtcgcaagtgctcaagttaaaagtgcaattttgtttgcaagtctattttcaaaagaagcatcacaaattacagaattagacataagtagaaatcatactgaaacgatgtttaaacattatcaaattccaatacaagtaaatcaaaaagtgattacaacatctccttatgctataagcaatattcaacctaaaaactttgtagtaccaggagatatttcttcagctgctttctttattgtagctgctttgatttctccaggaagtgatattacaattcataatgttggcatcaatcctacacgttcaggtattatagatatcgttgaacaaatgaatggtaacattgaattatttaatgttacagagtcttcagaaccaactgcgtcgattagagttcagtatacgaacaacttgaaaccaatcacaattgaaggagatttaattcctaaagcaattgatgaattgccaattattgctttgttatgcactcaagcttctggtacaagtatgattaaggacgcagaggaattaaaggtaaaagaaactaatcgtattgatacaactgcagatatgcttaatttactaggttttaaattacaagctacagaggatggattaattattcatccctctgaattaactagaaatgctatagtagatagcttaactgaccacagaattggcatgatgcttgcagtcgcctctattttaagtgattcgccattaacgatacgtcagtttgatgcagtaaatgtatcattccctggtttcttgccgaaattaaagcttttagaaaatgagggataaaatattatggaagatatctataaattaatagacgatatcaatcttcaaaaattagatcatttagatacacgtgtaaatgaagcattaacatccaataatgatgatgctttatttattttaggagaaacattatataactttggattaacacctcaaggtcttgaagtgtttagaacgttatatcataagtatccagatgaaagtgaactattaatttattttatcgaaggccttatgtctgaaaatcaaacagacgaagcattagaatatttaaatcaagttgaattatcacctgaaaagttaatgttagaagccgacttatatcaacaaatcaatatgactgaagttgctattgataagttaactgaagcgcgtgaattagaacctaatgacccaattattcattttgctttagcagaattactttattttgatggacaataccttcgtgctacacgagaatatgaagttgttttagatacaggcgaatatgaaataaatggaattaatttattttcaagaatggctgattgtgcgttacaaagtggaaattatagtgatgctatacagttatttgatgagattagtgaagatgaaatgatctctgatgactttttcaaaaaagccatcgcatatgaaaaaaatgatctaactcaagaagctataaaaattatgactacacttctttctaaagacccagactttattcaaggttacttttatttacaatctttatatgaaaatgaaaaaaattatccagatgcgattgaaacaggtaaagaagggttacgtcttaatcaattttataaagaactcatggtttctaccggtagtttagaaattgaacatggagatgcgaatgagggggtagaacttcttaaaaaagcacttgaagtagataatggttaccataaacctttacttatcttaagtgatttattccgtcaaaaagaagactatgaagccatcatttcacttctatcttatgtagatgaagaagatcttgaccctgtctttatgtggcatttagcacatgcatatggggaagaagaaagagatactgaagcccaacatttctatgaattggcttatccaacattaaaatctcagagtctattcttaagcgattattatttctatttaattgaaattggccaaaaagataaagctaaagtattacttaacgaattattaattatcgatccaactaatgaaacttggaatgaagaattgagcagattgaatgactagagtgggtgttaaaattgaatgacacattagttaaaatgaaacaaagctatattgaatatgctttgtttcattatcattttaagtccagaattagtgtgtggctattaaattatttaaaagcctcaccgccaaaattaaattgtagtcattttgtaaataagaaaattaaaagtcatataacccttgaaattggcctaaaacactccaatttctctgcgattaaattaacaaaagacgatcaaacattaattaatacaaatgaaatattcaattatatagcttctaaagatatttgtattgatatattcattcactttgaatacaacgataagcaagatgggcgattaaatgagcttataattcaacaattaatatattctgatcaatatcttgcatatcttaataatatatatcacttaagtcttgatctaaataaaaagtattcactaatcgaacaattagaacatcatatcgatgtaagtttacaaatgaaagatcaacaacgtttttatcaattatcacaaattttgagtgtattaactcatcactcatagatcaaaattaaaggaattataacttatgcctactttaagacaactatgggaattatcattatatcaacgttccatactcgtaatattgcttatatgtaatgttttaggcaccatttatggttttatatggtatggtgatcaattacttaagacacaatggcattatctaatttttgtaccagatagtcctattgcatcgctattgttatgtatatcaatttgtttaattattttaaataaacaaaatagtattattgaaggactagcatttgtaacattatttaaatatggtttatgggctgtcattatgaatttgataatgatggttaataataacgatataactattatgaatgtacttttaattattagtcatggaattatggtacttgaaagtatctatttttatccacgattcaaaatttctatactcagtttgtttatttctatgatatggatatttaacaatgattatgtagattatatattaaagaaatatccttattatgattttatacagcaacacgttcatttagttgcttttatcgcgctatggctaagtattatgtcacttatcctttattatagttttaataaattaataaaggttaaattatttgataaaaaattcgatagtcagtagaatatgattaaaggagagtgaaattgattgtctatagtgtcttatattatatatatcgtcattattatgctcattccaatgtgggctcaacacaaagtaaaatcaaattatgaaaaatattcacaggtaagatcaacaagtggtaagacgggtcgtgaagtagcagaagaaattcttcatgctaatggaatttacgatgtagatgtagttaagggcgaaggctttttaacagaccactatgatccaaataagaaagtagtttgtttatctcctgcaaactttgatcgtccttcagtagctggtacagctattgcggcacacgaagttggacacgctattcaacaccaacaaggttatgcgtttttacgttttagaactgctttagtacctttagcaaatattggtagttcattaagctatatcattattatggctggtatctttttaacagcattaggtagtgcttttggctcaactgcattatggattggtgctgggttaatgtcattagcagttttattctcaatcgtgacattaccagttgaatttgatgcaagctcaagagcgatgaaacaaattactgcacttaatattgtgaatgaaaaagaatataaacatgcgagaaaggtattatcagcagcagctatgacttatgtagcagcaacagctacagctgtagccgaacttgttagaattattttactggcacgtgcaagtgataactaaactacctttataaactaacttaatcttaaatcttgtgtaacaacatttaagattttcaaggagttatatcgagcgaaatatgaattcaaaaatgaattctgtttcgctctttttttatatctcatagaatagaattgataaaatgcattaacaactaatttgagatatacttagaaagaaacggaaaaaaggagaatgatgatgaaatctttaaatcaaatgcaaaaagaagtagatgactatattagtcaatttaaagcgggttatttttctccattagctaatttagcccgtctaacagaagaagtgggtgaacttgcaagagaaatcaatcattattacggtgaaaagcaaaagaaaccaacggaagaagaaaactctgttaaagctgaattaggagataatttatttgttttactttgcattgctaattcacttggtattgatatgacagaaagttttaatgatacaatggataaatttaatactagagataaaaatcgatttgaacgtaaataatggatagaaagggggttattttatgaaaataggtattacatgttatccgtcaatgggtggctcaggtatcatagcaactgaattaggtataaaaatggcagaaaggggacatgaagttcactttattacgtcaaatattccttttagaattcgtaagcctttgcctaacattactatccatcaagtcgaagtaaatcaatatgcagtatttcaatatccaccatatgatattacattgagcacaaaaatatctgaagttattaaagaatatgatttagatatcttgcatatgcattatgctgtaccacacgctgtatgtggtattttagcacgtcaaatgtctggaaaagatataaaaattatgacaacattacatggtactgatatcacagtgttaggctatgatcattcacttaaaggcgctattaaatttggcattgaacaaagtgacctcgtgactagtgtcagtcattcattagctaaacaaacacagtcaattattgaaacagataaagagattattcctatttataattttgttcgagaaaaagaatttcctacacaacatgaaaatcaatataaagagctttacgatataaagcctgaggaaaaagttcttatacatgtatcaaactttagaaaagtcaaacgtattgacactattttagaaactttcgctaaagttcataaacatataccaagcaagttgatcttattaggtgatggtccagaacttttagatatgcgtaaaatagcaaggtcattacatatcgaagatgatgtattatttttaggtaaacaagatcaagttagtaaattctatcaaatggctgatttagttttgctgttaagtgaaaaagaaagttttggccttacactattagaggcaatgactacaggagtcgtacctataggttcaaatgctggtggtatcaaagaagtcatcaaacatggtgaaacaggttatattgtagatgtaggagatagtgaacaagcaagtcattatgcactaaaattattaacagatgagcaactttatcaagaattacaaagtaatatgcttaaagatattaaacaacgatttagttctgaacttatcgtcgatcaatatgaatattactataaaaaaatgttgaattaaaaaagaggattaatatgggtaatgaattatttgaaacagctttgccaattctaaatcaaatagaaaaacatcatttcgaagcttattttgtaggcggggcagtcagagattacattatgcatcgtacaattcatgatattgatatcactacaagtgcgatgccagacgaaattgaagatatatttgaacacactattccaattggaaaagagcatggcacaatcaatgttgttttcaacaatgaaaattacgaagtgacaacatttagatcagaaggtgattatttagatcaccgtcgtccaagtgaagttaattttgtgagaaatctctatgaagatgtacaacgtagagatttcactatcaatgctattgctatggataaaaattataaaatatttgattactttggtggtcaaaaggatatacaatcaaaattgatacgtacggtagggaatccaagtgaacgatttaaagaagatgcattaagaattattcgtggccttagatttcagtcacaacttacatttgatattcatactgaaacctttgaagcaatgcaattaacttgttcggacgttaaatatttatcaatcgagcgaattgttgtagaatttaaaaaattaatcttaggaagtaatgttaaacagagttatcataatttattatctttaaaaatttttaattatattccattttttaatgaattagatatgacatgtgtttacatcaatgaacctcttgaatttgaacaatggttagccatcttacttataaaaaataataatcttccttctttaaagcaattaaaaattagtaataaagaaaaatcagatatacatacatatattgctatcattgaaacattacctcaaattactactaaagatgctttgaaattatttgtttatgattatagtgactattatatcttaaaggttttaaatatttattctgtacttcaaaataatcaaattcctaccgcttcagaacttattatcaattctctttctattaaacaagtcgttcaacaccttcaattacatgaacgtaaagaaatggatgtgaatggaaaagatttacttgcacattttaataaaaatggtggcccttggttaaaaaatgtattgagagaaatagaatgtgcgatagttactgataaaatcaaaaataacaaagaagaaattttgaaatgggtgaatgaaaatgtcaaaatatagtcaagatgtcgttaaaatgttatatgagcatcaatcagaatatatttctggtcaatacattgcaaatcagcttaatatatcgagagctgctgtgaaaaaagtaattgatcaattaaaagcagatggatgtgatattgactcaattaatcataaaggacataagcttaatgcatcgccaaatcgttggtatagaggcattatcaataaagtactagagtctaatcatttagtatccaaaattgaagtatatgatagtgttgaatctactcaaactattgctaaacaaggtcttgttgataatcagcataccatgttaattttaagtgatgaacaaacaaaaggtcgtggtcgtttcaatcgtaattggtcttcttcaaaaggaaaagggttatggatgtctgttgttttaagacctaatgtctcatttgcaatgattccaaaatttaatctttttatagctttaggaattagagatgctatccaagcattttctagagacaaagtagagattaaatggccaaatgatatttatattaatgataaaaaagtatgtggatttttaacagaaatggtagcaaatgctgatgcagttgaggccataatatgtggtattggtattaatttaaaccatcaagaagaagatttttctgatatgatacgtcatcgtgctacaagcattcgcttgcaccattcagaagaaatcaatcgatatcaatttttgaaacgtttaattgaggaaattgaaaagcgttaccatcaatttcttaactcttcatttgaaacgattagagatgaatacattcgtacatctaatatttggcatcgtaagttaacatttactgaaaatggagaacaatttataggtgaagctattgatattaataatgacggctttttaattgtcaaagatgaagataatcagactagacgacttataagcgcagatatagatatataagcatacggatagaattaggagagatagatatggcatatacaagttttgcggtagtagatttagaaacaaccggaaaccaacttgaacatgatgaaattatacaaattggtattacatttgtacgtgataataaaatatcaggagcttatcattcaatgattcgtactgatttggaaatcccaccatttatccaagctttgacttctatcgaagaaactatgctagaacaagcaccgtattttcatgaaattgctgatgatatatatgaacaactcaaagattgtatatttgtagcccacaatgttgactttgatttgaatttcattaaaaaagcatttgaaaaaagtaatattcattttaaacctaaaaaggtgcttgataccctagaattatttaaaattgcatttcctactgaaaaaagttaccaattaagtgaattagcaaatgctcataatatacctctgacaaatgcacatcgagcagatgaggatgcaacaacaacggcctatttaatgattaaagcttttaaaaagtttgagtcattacctatagataccttaaaacaattatattatttaagtaagcatttaaaatatgatttatttaacattttatttgaaatggtcagacaacatcataatcatgatatagattatcagtatgctcaatttgaacagattatctataaaaaacaacaagacttaaaagtgccacaaattgaatttaaaggttcattaaaagatttatatctagaagttacaacagcacttgaacttacttatcgcccacaacaactctatttgtcagaaattattttagagcagttaatgcataatgataaggcacttattgaagcacctttaggaagtggtaaatcattagcatacttattagctgcattgatgtataacattgaaacaggcagacatgtaatgatttcaacaaacacgaaattacttcaacatcaattacttcaaaaagatattcctagtattaatcgcgcgctagatttcaaaattaatgctgcacttattaaaagtaaaacagactatatttcactaggattgataagtcaaattttaaaagatgatacagctaactatgaagtgaatattttaaaaatgcaattacttatatggatattagaaacaaatactggagatatacaagagttaaatttaaaaggtggtcagaaaatgtattttgaccaaaaattagaaacttatgttccagtaagacacgatattcattactataattatataaaacgtaatgctcaaaatattcaaattggtattactaatcatgcgcatcttattcattcagatcaagagaattcaatctatcagttatttgatgattgtatcattgatgaagcacatcgtttacctgattatgctcttaatcaagtgaccaatgaattaaactattctgatatcaaatatcagttaggtttaatagggaaaaatgaaaatgaaaagcttcttaaattagtagatcatttagagcaacaacgtattttggaacgattagatattccacctattgacgtgtttggtttaaaatctaatatttctgatttacacgaactaaatgaaaccctatttaatcatattttcgatattgttcaacactcagatgtacatgatgatgatgtacatcgatatcattatgtattcgactttgattctacacgtattctaaaagatttacatacaattgtagacaaaatcaataaaactttagaattttttaatggtattaaccataaaacaatcaaatctatacgtaagcaattactttacattaacgataattacagacatatagaacaaagtttaaaacaaaatcatactgccttcatatctatcaaaaatttgaatcaaaaatcgaccatacgtctaattgtaaaagattatgaagtacgggatattttaacaaagcaagtgctcgagaaatttaaatcattaacatttatttcaggcacacttacatttaaccattcgtttgaggcatttaaaaactggtttaaagaagatgtagaatttaatacttatgaagtacagtcatcatttcaaaaccataaatcaacaaatatttatattccaagtgatgttgtttcttatgattttaaaaatacagaggattatgtagcgtctattgtagactatattcaagagtacgtcactataacacaatctaaatgtctcgtacttttcaccagttatcgaatgatgcatatggtacaagagctattaaatgaattaccgatatttgatgattatgttattttgacccaacaacaaaatcaaaactataaaatcgttcaacaatttaatcactttgataaagctattttgttaggtacatcaacattttttgaaggatttgactatcaatctaacggtattaaatgtgtgatgattgctaaattaccattcatgaataaatataatacaaagcattggttaatggattcagaatttgaatctacatttaaagattatgtcttacctgatgctgtaacgcgtttcagacaaggtctaggtagattgattcgtaacgaagacgataagggactcattgtttcctttgatgatcgtttaacaaatagtaactataagcgttttttcgaacaatcgttagaatcttattctcaaaaaaaaggggatattcaacaatttagtaaattactttaccgcatgcaggcaagtaaactgaaaaacagaaaaaaatagtttattttaaataatgagaacactattcaggtgctagaagttcactttctattttgataaaataaataagtattgtataaaaagaaaataaagtaggagtttgattatgaaaacaacaattaaacaagcaaaacaatacattaatcaagaagtcacaattggcgcttggttaacaaataaacgttcaagcggtaaaatcgcatttttacaattacgtgatggtagtggatttatgcaaggtgttgtcgttaaatcagaagtcgatgaagaaacatttaaacttgctaaagacattacacaagaatcatcactttatgtcacaggtacgattacagaagataatcgttctgatttaggctatgaaatgcaagtaaaatcaattgatgtcattcatgaagctcacgattatccaatcacacctaaaaaccatggtacagaattcttaatggatcatcgtcacttatggttaagatctaaaaagcaacatgcagtaatgaaaattagaaatgaaatcattagagcaacatatgaattttttaatgaaaatggctttactaaaattgatccgcctatcttaactgcaagtgcaccagaaggtactagtgaattattccatactaaatactttgatcaagatgcatttttatctcaaagtggtcaattatatatggaagctgcagctatggcacatggacgtgtcttctcatttggaccaacatttagagctgaaaaatctaaaacaagacgtcatttaattgagttctggatgattgaacctgaaatggcattcacaaatcacgaagaaagtttacaagttcaagaacaatatgtatctcatatcgtaaaatctgtattagaacattgtaaattagaattaaaagcgctagatagagatacgagtaaattagaaaaagtatctgcgccattcccacgcatctcttatgatgatgctatcaagttcttaaaagaagaaggatttgatgacattgaatggggtgaagactttggtgcgccacatgaaacagctatagccaatcattatgatttaccagtatttattacaaattatccaactaaaattaaaccattctatatgcagccaaaccctaacaacgaagacacagttttatgtgcagatttaattgcaccagaaggttatggtgaaattattggtggttctgaacgtattaatgatttagaattattagaacaacgtatcgatgaacatcaacttgatacagaaagttataactactatttagacttacgtcgttatggtagtgtgccacacagtggttttggtttaggtttagaacgcacagttgcatggatttcaggcgttgaacacgtgagagaaacatcaccattcccacgtttattaaatcgtttatatccataaaatatcacgttttataaatcatacatggggagtgagactaaatgatgttattcatgtctcactcccactttttaaaataagaaagagaggggtatcatggacacacatcaacttaaaactcgtcctgttgtagttagaagggaacttttcgatcattacaatgaattaggtttaaatgaaaaagatttagtcattttgattaagttgatttatgccgctgaagtttctaataaacaaccctcaatagaatttttgcaaaaaggttcaaatatggagccgagagaaataacatcaattattcaaaatttaattcagcgtgatttacttgcactacatgtaagtaaagatgaggaaggaaaatttactgaatatatgaatttaaatcgtttttacgaaaagttaagtgatattttaactcaagaaaaaaatgaaactacacatcatcaaacgcaacaaaactttaaggaattatttcaatatattgaacagttgttttcgagaccattatcaccatatgaaatcgaaacgctcaaccaatggattgatgtagaccaacatgattacactttaatacgtgctgcattagatgaagcatatagtcatgataaattaagttttaaatatgttgatcgtatcttattaaattggaagaaaaacaatgtaacaactttagaagaatctaacaaagtgagagaaaaattcaataaacctaaattaactcatactgtaaaacatatacctaaatttgactggttaaatggagagaatctagatggtaagtaagaaaaaagcattagaaatgattgacgttattgcagatatgtttcctgatgcagaatgtgaattaaaacatgataatccctttgaattaacaatagctgtattattatctgcgcaatgtacagataatttagttaataaagtgacacgttcactttttaaaaaatataaaactcctgaagattatttaaaagtagatatagaagaattgcagaatgatataaaatcaataggtttatatcgtaataaagcaaaaaatattaaaaaattatgccaatctttactcgaccagtacggtggacaagttcctcatacacataaagatttagaaagcttagctggagtcggacgaaaaacagcgaacgttgtcatgagtgtagcttttgatgagccttctttggcagtagacacacacgttgaacgtgtttcaaagcgtctaggtattaataagtggaaagataatgttaaacaagtagaagaacgtttgtgtgatattattccaaaagaaagatggagtaaaagtcatcatcaacttatcttttttggacgttatcattgtattgctcgaaaaccaaaatgtgatatttgtccattacttgaggattgtagagaagggcaaaaacgcatgaaagtaatgaaaaaggaagtcggaacaaatgattaataaatcacaatttaaatcgctagaaaatgaacttgatgtctatgctaagaaaagacaactaaattctgatttagcaaaacaatatatcgatgattattttgaactgcttcttttgttctttaaacaaattaatgaaatagagtctattgatttaaatcatttagaccaatatccagttgttcctatgaattttttagaacgatatcaatatatgttaaaaagaaaataccactttatggggtatagtcaaatgaaaacattaaaaaatgagcttattaaaatgaacgcttcatatcaaattagaagaaaaaatcaaaataataattaatatgaaagatagtctagagcaaagttgttctagactttttttaattaaaaaaacgacatagccttataaaagactatgtcgtttttaaagctattacgacgcttttctaaaattaaaaatcgtgtttgctttaaatatgttagataaactactattgttatttgtattatcattattattattttgttgagttgatgtggtactattgttagcactgttgttcgtagttgaattatttgctgagttatcagttgtattaccagtattcgttgtagtattaccgttcgttgttgatgtagtatttgagttgttatcactggtagaagtagaattgcttgaactactttctgtactactagaattacttgaatcatttgatgagctactatctgaactactagtagacttgttatcatatttacttcctgatgttgtattattatctggatgatctttaacagatagtgtacttgcacttgaaccagtaactgaatcaggttttttgaagtcaccatcattacttgaagtaatatctgacatcacatctttatatagatattgtgcatattcttgttcagaatgtcctaagaatgaatcttcaccgcctggtttaatttggctgaagcccatccaaattgacattgtatatttaggtgtgaaaccattcatccaaatatctttagctgcattgtcaggtaagttatattgattattaacttctgtgccataagtacttgtacctgttttagcacccatattaacgccagcaacaccatgaccgtaagcagaaccatatggtttaaatgtaccagttaacatttctgcaagcatgtaagcagtataatcttccatcgctttatgacttgtatgatcaaattcgatagtttcatcatcagatgttacaactttgcgaattgaatgtgcattattgtaagtaccaccattagctattgatgcgaatgctgatgctaattgagtaggtgagaattcagaagcaccgccacctaaaatttcagatggccctaaatcaatttcataatctaaaccaactttagacgcaaaatcttttggagcatctttacctgcatttgatgatacttgttgccaagcttttaaagcaggaatattaaaactttgtcttaatgcatcgtatgcagatactgtaccatgaccttgcccatcatagttacggaatgtaccaccatcaatggaataacttgattcatcttgcattgcgtggtttgtagcccattgcatattttcaattgctggaccgtatgataagaatggtttcagtgatgaaccagtcaagtgtgtatctgtagcagcgttacgatcaacgacatctctataatttcgtccaccagaaatggctacaatgcctcctgttttactatcaagaatggttgaacccacttgttgatcatcatttttatagtaatcaccattatcaatgcgatcttgaagcgttttttgaacgtttttatccatatttgtataaatcttaataccactttgcattaaatcactatagtttttatttttaaagtgtttattgcctattaattcagctttaacaaaattaacgtaagaatcatactcactattagaatcatcattagatatttgacgttcttttgttgtacgttttactaaattgtcttctaatgaagtagctttagcttctttccactgtttatcagagattctatgatggtagtgcattaagtataaaacagtttctttacgattttcagcttctttcgggttatcataaatgttatacaggttaggaacttgtggtaaaccagctagataggcttcttcagctaaattaagttcatttaaatttttattaaagtaatatttagctgcagctctaacgccatatacaccgtctgagtaataaattttatttaagtacatttggaaaatatcatctttactgtactcttgctctaaacggtaagatagataagcttcttgcgctttacgtccaatagatttcttttctgaaaggaacgaacgcttaactacttgttgtgttagagtagatgccccttgggaaccaaaaccgccagtcaagttcttaccaatagcaccaaataaacgtttatagtctaaagcaccatgttcatagaaacgattatcctcagttgctaacacggcatttttcatattttttggaacatctttcaaatcaacatgttctctacgtgcaccattgtctaatttcttaaccaagtcaccgtttttatcataaatttcagcaggctttggatcctgtaatttagactcattaaatgctggagctttccaagcatagtatgcaaatagaagtataccgagtagaagtaacacgataaaggcaatgaataaaaagcctataatcttaataatcgttctttttacattcttcttcttttttgatttggatttcccatttttgcctttatttggttgggaagatcctttattttccgtcatacgcggtcctcactttcatctaatatcaacttatcaacagccttgagataattcaatctaggttgatactgataaggaatatagtaactattttttttgatttcttcaactgttattgatttttttatttcctttttatatctttcccaaaaaggttcaaacttcgaaaaaggtagtagatatacctcatcaagcactttaaatctaatcagtaaaaagacgagtcctttttgcataaaacaacttttcatatgttctacttgatgatcatggatattatttaaagggaaagacgttttatttttcgtttctttcgcttcaaaatcaatataatagcctcgatagacgccattataatcagttgtagaaggcgtacgaaagtatgcttcattaattacagctttacttcttttaggataatgaacatttactatttgaataggagtaggtttcttatgtataacagccacaccatgcttaaaataataattgttagattgttcaatatctttttcgagagtcatacctcgtccaccatatttaatgttactagaagcttcactttgattacttccaaccttagtaggatttagtttaaatggttttccatttggataatttatcatactcaccacacaaatttaatattacactttcaatgtctaagagaataatattaaactataatacgataataatgaaatgagcataatatttatattatactacacataattaaatttattcattaattatctattctattttaacgtgctttaacagtgaaaacaatatgtttaaaaatttgtaataatgtaaaatttatatctaaacaatactctataataattgtaagaaattgtaagaatataggaggcatcgttatgtacacattaattaatgaaatacttaaagaattacagtacatggcgtcaagctataatgaaataaaattgacgcagtcagagaagccatttcatcgagatgttgttccttatgtaaaaaaaattgatgatttaactgaagaattatctcattatcatgatgaactaattcaatttccttatatgaataaggaaaaattagaaattttagttaaacatattaaggaattatctgtagagtgtcactacaataaaacaagtaagaagttatttaatgaaaaattgaagtccgttaattatgatcttaccaatttgtttaaatatatcaaagataaagaggaatcaatgcattgaaaacagtatatgtgactggatataaatcatttgaattaaatatatttaaagatgatatgaaagaagtggattatcttaaacaatttatagaacataaattattacagtatattgacgaagggctagaatgggtacttattcaaggacaaattggtattgaattatgggcagctgaagtagtattaaaattgcaagacacacatcctgagttaaaattaggtattatcacaccattttatggtcatacctccaagtggaatgaacacaatatagcaaagtatgaatctattgctagtaatgcacaatttctagatagtgtatttcattctgaatatcaaggaccttttcaatttaaacaaacagatcaattcatattagatcatacagatatgacgttattaatttatgatgatgaacaagaaggaagtccaaaatattttaagaggatgttagttgattttatggaaaaaacgacttataattgtgatattgtgacatttgatgaacttactgactttattaacgatttacaatggcaacaagaccaaagttttgaatgaggtggaaattaatggcagatgtttctttaaagctttcagcaaaagatatctatgaaaaagactttgaaaaaacgatggctcgcggctatcgtcgtgaagaagtcgatgcttttttagatgatatcattactgattatcagaaaatggctgatatgaataatgaagtagtcagactatctgaagaaaataataaacttaaaaaagaagttgaagaattgagaatcagagttgcaacttcacgtccttctgataataagtcatttgcttcaagtaattcgaaatcagcgaataataacgtagatattttaaaaagaatttctaatcttgaaaaagctgtttttggtaaataatacattggtatcttaaagatataagcttgttacgaagcatgtttgattgctattatgttggattttgatagctaattatttatctatttaaaattctattaaatattttaaaattatgttatactcacacaagtgatattttgggtaatcgctatagaaatatagaggaaagtccatgctcacacaatctgagatgattgtagtgttcgtgcttgatgaaacaataagtcaaggcattaatttgacggcaatgaaataacctaagtcattaattgatacggttaaaatagtttgaaagtgccacagtgacgtagcttttatagaaatataaaaggtggaacgcggtaaacccctcgagtgagcaatccaaatttggtaggagcacttgtttagcggaattcaacgtataaacgagacatctttactcgcatagtaaagatttgtagacagatggttaccaccaaagtaccagtacaactagtgtacgttatgagtacaatggtacagaacatggcttatagagatatcacggactagtttagctctccctttttatggagagctttttttatattgtatacataattattttaatatttgttaatatactaatatgatatgagacaaaggagatgaaataatgtatcaattattagcagtgtgtccaatgggtcttgaagccgtagttgctaaagaaatacaagaacttggttatgatactcaagttgaaaatggacgtattttctttgaaggtgatgctaatgccattgtaaaatgtaatttatggctacgtacagctgatcgattaaaaatagtagtaggtcgcttcaatgctaaaacattcgatgaactttttgaaaagacaaaagcattaccttgggaaacaattatcgataaagaggggcaatttcctgtccaaggtcgtagtgtaaaatctacacttcatagcgttcctgattgtcaagccattactaaaaaagctatcgttgaacgtcttaaaaaagcttataatgaaaaaggatggttaaatgaaagtggtgcgaaatatcctgttgaagtagccattcttaaagataatgtcctacttaccattgatacgtcaggttcagggctaaatcgtagagggtaccgtattgcacaaggtgaagcacctattaaagaaacattagcagctagcttagtacgtttagccaattggaaaggtgatacaccctttattgatccattctgtggttctggaacaattgctattgaagcatgtttaattgctcaaaatattgcgccaggttttaatagagaatttgtatcagaggaatggaatatcatgcctcctaatatttatgacgtcatgcgtgatgaagctgatcaacaagctgactatgataaagatattcaagtgtatgcgtctgatatagatccagaaatggttgaaattgctaaacgtaatgctgaagaagtaggcctaagtgatattattcaatttagtgttaaggatgttaatacattaactatcgatcaagaagggcctgtagcgttagttggtaacccaccatacggcgaacgtattggagatagagatgaagtagaagaaatgtatcgatatgtaggtaaactaatgaaacaatacccgtatttatcaacatatatccttacaagtaataaagaatttgagtatttagttgatcgtaaagcaacaaaacgtcgaaaactttttaatggttatatcgaatgcacgtattatcaatactggggaaaaaagcctaatattgataaataaattgatttgaagatttatttgaaaataattaattttgtaaatttttcttaataaattagataatatttatttaaaatttatgtatttattagcactataatagtgactattgtaaagttattagtaagcgtgttaaaaacacagcacatttaaacagtatagtaaggagagtaagttatgcaaacagttctaattgtaggggctaacggaaaagtatcaattgaagcaactaaaattttcttagagaattctagttttaatgttgatttatttttaagaaatgcccatcgtattcctgattacgcatctaatcgtatcactgtctttgaaggtgatgctaaaaatgttgaagatttagaaaaagcattagatcaagtagatattgtttttgcaagtttatcaggatccctagatagagaagcacaagccattatagatgccatgaacaaaaagaatgttaaacgtttaatatttgtggcggctcctggtatttatgacgaattaccagataaattcaatacatttaataaagaacaatttggtgaaaaattaactaaatatcgtaaagcagctgatttaattgaagcttctgacttagattatacaattattcgtcctgcttggttaacatttaaaaatgaatcagattatgaaattactcaaaaaggtgatacctttaaaggaacagaagtttctagaagaagtgtagccaatttagcagtacgtatagcgaaacaacctgaactttattctagacaaaatattggagtaaataaaccaaatactgatggcgataaaccagcttggtttaactaattcattctatataggtttttattatttcttatgataaaatttaataaacacagctaaagataatttagttttatcaccctaaaagtaaggttataattctttttagttttataaccttaatttttttatattttagagtgagcgaaataaaggggatagcattatgcaaaataatgaacaattagatgtattatacaaactaaaaaaagaaatagaaaaatcgaataacgaagcattagtacatacaataaatcaagtgattaaaaaagtatatttaaatcaatatactttatcatttgttggacatttttcagctggtaaatcaacattaatcaatttattattagaacaagatatattgcctagttcacctgtaccaacgacgagtaatacggctatagtttctgtttcaaaagaagaagagattattgctaatttagaatatcaaaattatgttaagctaaaaacgtatgaagatgtaaaaataatgaaccgattaaatatggatgtggaatctattgaaataaagttcccttcaaataagtttaatcttggttttacattacaagacactccaggagtagattcaaatgtttctgcacaccaatccactactgaacaatttttatatacaagcaatatgattgtgtatacagttgattataatcatgttcagtctgcactcaatttccaatttatgaaacgcatgaatcaagtaggcatacctattatttttgttatcaatcaaattgataagcataatgagaatgaaatttcttttgatacatttaaacaaaaagtagaacaatctatacaagattgggatattaaagtcgatcaactattttatgttagtaaatttgatcatccaaacaatcaacttcatttattctcagagtttttagaagaaaaagataaactacgtgaacctattgaagattttgtaacacgtatcattgaatttatacatcgtactcagcttttatatattcaagagcatatgcaaaatatacttgacgacttaaatatcaatgaatccgaatttgaagaatcctataaacaatttcaacagaatcaagctataagtgaagaagcacaattattaaatcattcttctcaattattaatgtacttaaaagaaaaacggaaaaatatattagataatgcttatattatgactcatgatatgcgagaagatattcgttattatcttgaaagcatggctttagacttcaaagtgggtggtcttctaaataaaaaaaagaaaacagaagaagagagagcaaaacgtttacaaaatgttgtagaccgtttacaagaaaaagtgaatcgacacattcgtcaacccatgcgtgaagatttatcttttataactcgctttatccatcattctgaagtgaatcaacgaattttaaatcaacattatcaaattgaacctactttaatttctaatttatatcaagtacaaacaagcattaataatacctatgtgctcacatttagtgatgacgttgtaaaagcaattgcacgcgttgtcgaaaaacaatcagattcattatttaaagatattattgaacatactgaagcaacggaattatctaacatagataataatgatgcacatttatatgaacagtatcttgagttcaagaatttaaaacagtcattaacaactgaaaattataaacattattatattcatatgaatgactcactcgataaattaattgatcgaacagaaatacattatgaacttaatcaatcaaccatatcttcaacaaatgatttagacgaagatattacatcaactaaggctacgagaactcatcactttgatattcagaaagcactggctatcattgagcctgttcctttattcaataaaacaaagcaagacatcaaagaaacattgcaacgtatagataataaaattgtaaaaataggtgtcttcggtacatttagtgcaggaaaaagtagcttgattaatggtttacttggagatcattatcttgtaagctcacctaatccaacaacggcagctacaactgaaatctcatatggtcatgatagtcaaattactttgaaaacaaatacgcaattgttaaatgaattaaatcaattgcttgaatatcaaaacgtttcttttaactctttagaagaatttatgaatagtaatattgagtctttaaaacaacaattagaaaaaaatcaattggcttttataacatcagtagagaagcacttttcaatgtaccaagatatgctaaaagaaggtataacacatactatttcacaacatgaaattaagcaatggagtgctgaagacgaatacgctacatttgttaaaaccgttcatatacaccttccactggattggttaaaagacaaaattatcgttgattcattagggttacattctaataatcaacgacatacaaatgaaactgaacaaatcttaacttcttcagacctaattttatatgtgagctattttaatcactcatttactgataatgacaaagcatttattgaacatatgaaagatattaaccaattaaatgaagcacagacatttaaaatgattattaatgcggtagatttagctgaaactaatgaagatttaatagcagtggagcagtatgtaaaagatgctctatctcaaatgaatctgccatctgaattattcggtgtatcaagtaaacgtgcattggagactaaagatgaaggcattcttaaattaaaagaaagtattaatcattttgtcgaaactgaatcgaaaacgattttagagaagcaaatggttcatcaaatcgagcaaatgcgcgataactttaatcaaatcatctatgaatttaaaacaaatcaaacacgtatgttagaacgacaacaacaacttgaaacttataaagataaaacaccattaactaaccaaatgattcatacaagtgagcaacatactaaaaatgaggttgaagaacaaatctatcatttaaataaacgattacagcttcaattattagatgaggttaaaaaagtatataatagtcaaatgacacaaaataatgattttaatgatgaaaagaaacatgctacgaaaatgtacttagatcaagttcatcaacgattatatttagaacaaactttattagtcgaaagaataaaaacatactttacttctcaattagatcaacaagtagcaccaacaattcaaaaattaaactcagttcatgtacttatccaacctcattttaaaataacagcgccgtttactgatgatgcactattacgtattagtttagaagagatgctttcagttttacctaaacagttgtctaaacgtaaaattttaaatgcaaatgcgcaaagagaactacaagaaatgatttgttcaaatacactagaactactacaaccatcactaaacgcattaaaacaacaattagattattatgtttctaacttaactcacgacgcgaacatcgaacttaatcagttaaataataatgttttagaacaaatcaatgacttattatctaaacgtatcgatgattcactcattaaacaattagaaacagtaaatcaacaattggacccacttttaaattagaaagaaggattaatatatgactcaacgtgtcttacttgtagatggaatggcgctcttatttagacatttttatgctacaagtctacacaaacaatttatgtataattctaaaggcattccaaccaatgggattcagggttttgttagacatatttttacggcaattaaggatattaaaccaagtcatgtcgcgatatgttgggatatggggcaagcgacctttagaaatgatatgtatacttcttataaacaaaatagacctgcaccaccagatgaattgatacctcaattcgattacgtaaaagacatttcagaacaatttggttttgtgaatatcggtgttgcaaattatgaggcagacgatgtcataggaacactcgctaaaatatattcaaaagataatgaagtacatattgtaactggagatagagatattttacaatgtatcaatgaacaagtagaagtctggttaatcagaaaaggttttaatatttatcatcattatactcttaatcgttttaatgaagagtatgcattacatccacttcaacttattgatattaaagcatttatgggagattcagcagatgggtatcctggtgttaaaggtattggagaaaaaaccgccattaaattaatacaatcttatggtagcgttgaaaacgtactagacaatatcgaatcacttacacctaatcaacagaaaaaaattgcaattgataaagaaaatttgattctatccaaacaattagcgaaaatctatacagatgtgcctattgatacaactgcattatatgaagaaatgaagtatacacattcattgaatcatattctttcaatttgtaatgaacacgaactttatgtctctggtaaatatcttgcttcaaaaattttaatgtaaaacagataaaaaaagaagataaaagaattcaacataaattcttttatcttcttttttacattattattgtttattcttaattaatttgtatagagcttgttgtgctaattgatttgcttctttatttttatctcttggaacccattttacaaatagcaaatcaaaacttgcttctaaaatctccatattttcaaaaaatggtttgaaacgcgcattttttacataaccttgattcacgctatcttctatcaatttagaatctgtgtgcaataaagcatttgaaacatttaattcacgagcatgctctaatgcatgaatgaatgcagaccattcagcactatggttgtccaattctcctaaatcatgtgtataagtatatttaatatcattttctttaattactatcccacacgtactacgtcccggattgccactcgtcgcagcatcaaaaaatattttagccattaaaaacacctctagtttaagcattaattaaacactatttgtctatttaaaaatagcatattgcttagtaaacctaaacaatatgcatgtatgattgttttaataaccttcgtctaatttttgaatttttccatttcgatagaatgacttcgcaatataaccaaatggaacattgaaaatcgttgagactaattttaaaacatacgtagtaataaagatttcaaatacaacacttgcaggcaatgtaccgataaatgcgatagttacaaataatgcagtatcaataattgaacttaataccgtacttccataagctctaataataaatgttttatctgattgaaaaactttttttatcattgaaaagatgaacacatctacatgttgccctataatataagcaataattgaacctaaagcaattctcggcactaaatcaaaaatcgtagataatgctttttgagatatatcttctggtgcgggtataaaatgtaatgacatttgcattacaattatcataacaagagttgatgagaagcctaaccatacagcacgtttagcaacttttcgtccataaatatcatttaaaatatctgtagctaggtagatagaggcaaacattacattacctagagttgctgagataccaaaaatatcaaccgttttgatgacttggatattagcaataattgtaccgatagctacccaagcgataagaccttgtttaccaaaacaacgatacattaaaaccattacaataaatgttacaaaaaaagtagcaatgccaaaaaattcattatacatcatttatcctcctaaattttgataatgcgggtgtttagaaaccgctaagcaactttaatattttatagtaaaagtaattcaaattcaatactcattaatcaattcatattataaatattaaaaaataaaatcgattattttaaaatgatcatcatataagttataataactccatatttataaaattaagtataaggagtgaaagttatacttacacattccgaacaaaatgcaatagaaaaaattgatgaattaatgaatacttattgtgataaatgtttactgaaaacacacattagaaaaacagaaggaaaaacacaagcacatcatttttgtatttctgaatgttcaataggtaagcaaattaagcaattaggcaatgaacttcaataggagggaattttatgcatataaagtcaattgaagacacaccaaattataatacgattaaaattaatttaagtgaaaaacgtaaagataatcaattaaatacgtatacatctgctcaagatgggcaacctgattttattaatcgattatttgatatcgaaggagtaaagtcagttttttatgtcatggattttatttcagtagataaagaggaatatgccaattgggatgatcttgtacctaaaattgaagacacattttaattttaggaggaacagtagtggaaatattaaaaattgaaccaacaccaagcccaaatacaatgaaaatcgttttaagtgaaaagcgtgctgataatcagtcgaacacatatacagaagtcaaaacatctcaacctgattttattaatgacttattacaaattaaagatgttaaatctatatttcatgtaattgactttttagctattgataagtatccgaaagcaaattgggaagaggtattacctcaaattactgcgtcacttcaaaaagaggaaacgattagtcaatcatctcagtttgatgaacactatggagaagtgaaagcagagatactcacttttaaaaatatcccatatcaaattaaattaacaaatgctcatgaagaaatacgtaaacaactacctgatatctttatcaatagtatgcttaaagcacaagaagatgatgataatgttatttttcttagaaaatggaaagaggttggtttacgttatggagaactttctttagttatggaagaagtttatgaagaaatcattgcattgtatccaaaaagtcgattggaacaattagtcgttcaagctttatctaagcaaacgaaaagtatatctcatttttatcaacatgtttcatacgaggagtacttgaatgaatcagactggaaagtacgtctcagaatgttaacagaatttccaacaccaacacttgaggatattccactcttagagcaagccttaaatgaaaataagttaccattaagacgtcaagcgattgttttatttggtatgattgaaagtaaagaaatattgccatatttgtataaaggattaaatgataagcatcctgctattcgacgtacagctggagactgtatcagtgatttaggttataaagaagctttgccagaaatggaaaaagcacttaatgatccacaaaaaattgttcgttggagagctgcaatgtttttatttgaagaaggtggcaaagcgcaactcgcatctctaagagcgcatgcgaacgacaatgcttacgaagtaaaacttcaagtggaaatggcaatttctagaattgaaaatggcgatgaagcattaggttccgtatggaaacaaattgctaatcgtaataaacattaaaggagttttttatatgaatccgtatgaacaatatatgcatgaactagcacaacaaatgcgttctgaattaactgataatggttttacaagtttagaatcaagtgaagatgtatcaaactatatgaacaatgttaaagatgacgaaacaacatttgttgttattaattctacatgtggttgtgctgctggtctagcgagacctgccgctgtagcagttgctgatcaaaatgataaaaagccaacacataaagtcacagtgtttgctggacaagataaaaaagcaacgcaaacaatgcgcgattatatccaacaagtaccttcaagcccttcgtatgctttatttaaaggtacagaattaaaacattttattccgcgtgaacatattgaaggtagagatattcaagatatttgtatggatattaaagatgctttcgacgaaaattgttaatattattagactaatttactctatcttaatatgcatctccaataataaattatcaaactaagataatttattattggagatttttaaatataaaaatgttttgaaataatatatactcaataatataattcattcaatatctttctattttctagtataatgataattaatataaaatttaggagagatgtacatatgctcaatccttttgattcggcttatcacgatttatgtaatgacattttagaaattggtaatcaacgtgatgatagaacacatacaggtaccatttctaaatttggacatcaaatccgcttcgatttaacgaagggattccctttactcactacaaaaaaagtatctttcaaacttattgctactgagttattgtggtttataaaaggagatactaatattaagtatttattaaaatataataataatatttggaatgaatgggcttttgaaaaatatattcaatctgaagattatcatggtccagatatgacaaattttggacatcgttctcaaaaagatgaaaatttcaataaaatgtaccaacaggaaatgaaaaaatttaaagagaaagtgttaaatgatgatacttttgctaaaaaatatggtgatttaggacatgtctatggaaaacaatggcgtgattgggtagatcaatatggtaatcatttcgatcagcttaaaacagttattcaacaaattaagacaaatcctaattcgagaagacacattgtttcagcatggaatccgactgaaattgatagtatggcattaccaccatgtcatacaatgtttcagttctatgtacaagatggcaaattaagttgtcaactttatcaacgtagtgcagatattttcctaggtgtgccttttaatattgcaagttatgcattacttacgcatttaattgctaaagaatgtaatttagaagttggagaattcattcatacttttggagatgcacatatttattctaatcatatagaggcaatcaagactcaactttctagagaaagttttgcacctcctacattaaaaataaactctgaacaatcaatctttgatattaattatgaagatttagaacttgtagattatcaatctcatccagcaattaaagcgcccattgctgtgtaatctatctttaattaaaaataaactaaaaggggatatgataaatgacattgtcaattttagtggcacatgatcaacaacgtgtcattggttataaaaatgctctaccatggcatattccaaatgatttaaaacatgtaaaacaactctcaactggccatacacttgtaatgggtagaaaaacatttgaatctattggcaaaccattaccaaatagaaaaaatgtagttttaactcgtgataacaattttaaacctgacggcgttgaagtgattcacacaatagatgatatctacaacttagagggtcatgtttttattttcggtggccaaacattatttgaagtaatgattgataaagttgacgatatgtatatcactgtagtagacggaaaacatcaaggtgatacatttttccctccctacacatttgaagattggacggttgcatcttctgaagagggtcaacttgatgaaaaaaatactattccacatacctttttacatttagtacgaaaataaaataaactaagaggagaaattatgactaaacaagtaatcgttacagactctacctcagatttatcagctgaatatttaaatcaacataacatacatgtcgttccattaaatttaactattgataaagaatcatttgtagatcaagtagatatctcatctgaggagtacattaaacgtattgaagaaaacgctgacgtcaaaacgagtcagccatcaattggtaaatttattgaattatatgaacaacttgataatgacaatgacgatgtagaaatctttagtattcatatgtcttcaggattaagtggaacatatcagactgctttacaagcgagcaatatggttgaagcaaaagtaaatgtgattgattcaaaatcaatttcatttggattagcataccaaattcaacgtttagtagaacttgtaaatactaatctttcaagtatagaaattattaaacatatttcagacttgcagaaaaatattaaactatttgttgttattggccaactcaatcaattaattaaaggtggacgcatcagtaaaacaaaaggtttaatcggaaatataatgaaaataaaaccgataggaacacttagagagggatatttagaaatcgtacataattctcgtactcaaaattctagtattcaatatctaaaaaaagaaattgctaaatttattgaaaatcatactattcaatcgattggtattgcacatgcaaatacgattgaatttgttgaaaaagtaaaaaatcaatttaatgaagcatttggacaacaaagctatgatgttaatgtaacgacaccagtcatttctacacacactggtcaagacgctatcggtcttgtcgtagttagaggataatagataaataataggtcacttaagttattgatttctgagttaattactttaatttaatatcattatatcgtaaatttaaagaaagatagaggaggtaatataatggcatatgcaacattagcaggaggatgtttctggtgtatggttaaaccctttacatcttacccaggtattgaagatgtcgtatcaggttatagcggcggagatatagaaaatccaacgtatgaacaagtatgttcaaatcaaacgggtcatagagaagcagttcaaattacttataatccagatattacgtcatttgaaaatattttagatgtttactttaaaatatttgacccgacagataataaagggcaattttttgatagaggcgaaagctatgaaccagcaatattttatcacgatgaacaacaaaaaaaggctgccgaattaaaaatccaacaactaaatgaagaaggtatttttaaaaaaccaatcatcacaccagttcttccttacaaaaacttttatccagcagaagattaccatcaagactattataaaaaaaatcctatgcattatgagcaatatcaacgcggttctggtagaaaagcatttatagaatcacattgggggtctcaaaatgattaaaaaagataaaagcgaattaaatgatatggagtatcttgttactcaagaaaatggtacagaacctccttttcaaaatgaatattggaatcattttgataaaggaatatacgtagataaaatttctggtaagcctttatttacttctgaagagaaatttgaatctgattgtggttggccgagtttctcaaaagcattagatgatgatgaaattgttgaactcgtagataaatcatttggtatgattcgaactgaagttagatcagaagatgctaacagtcatttaggtcacgtattcaatgatggcccaaaagaaagtggcggattgcgttattgtattaattctgcagccattcaatttattccatacgaaaaattagaagaattaggatatggcgatttgattcaacattttaataaataggagcgatgaataatgtttaaaaaattatttggtaaagataaagaagtcaataaagaaactcaactatatgcaccattaacaggtgaatatgtcaaaattgaagatataccagatcctgtatttgcccaaaaaatgatgggtgaaggtttcggtattaatcctactgaaggtgaagtagtttccccagttgctggaaaagttgataatgtttttccaacaaaacatgcaattggtttaaaaactaaaaatggtcttgaaattttagtacacattggtttagatacggtgcagttagacggtgaaggatttaatgtacttgttagcagtggtgatacagtacaagtaggcgaccctctactcaaattcgatttagaatttattagaaataatgccaaatcagttatttcacctattattattacaaattctgatcaaacagaatctatttcactcgatgatgttaaagctgttattaaaggtgaaactaaagttgtcgatgtgacaatgagctaatgaaagatcattcattttatcaatttgccttaacggttagaggacgtaaagatgataaaggtgaattagccgaagacattttcaatgacttatcgtttccaaaacatgaaagtgacttcaacatattatcagactatatcgaaatgcaaagtgacattacgttacctatgtccgtatttgatgatttatatgaagaatatacagaatggttaaaattctaatttaaattcgttttatgtctaaatatgatatggagtggcatataaatcttaattttagatttatatgccactctttttatttttatctaattaagaaatacaatttcttataatttgcgtttgctcaaaaataaagacatactaggtatgtctttataaaaaatgataagagacaagatgtaattagaggaagtgattttatgaataatcattctgaggagcaccatgacggacaatcagatgaaaaaagatatgcatctactaaaaaaaagatgcatttgacaatatggcagtttatcttaattttattaagtgttattatcattacaacgattatagctgtatttgcgacgataggaatcaatcataaattaagtggtttaactaaagaagaacgtcaagaaatgaaaaaaatagaatttgcatataaaacgttagatacagattattacaaaaaacaaaactcaagtaaactttctgaagctgcgattaatggtatggtaaaagaattaaaagatccatattctgaatacatgacaaagtctgaaacaaagagctttaatgaagatgtatctggagattttgtaggtattggtgcagaaatgcaaaagaaaaataaagatattatgattacaagtcccatgaaagattctcctgctgaaaaagctggccttcaacctaaagatattgtcacaaaagttaatggcaagtcagtggtaggtaaacctttagatcaagttgttaaagtggtaagaggtaaagaaggctcaaatgttaagttaactattaaacgcggttctgaagaaaaagatattaacattaaacgtggtaaaattcatgttaaaagtgtggaatataagaaaaaaagtaacataggtgtatttacgattactaaattccaacagaatactgcgggtgaattaaaatctgcaattataaaagctcataatgctggtgttcgaaatatcatcttagacttgcgtaataatccaggtggattattagatgaggcagttaaaatggctaatatttttattgataaaggtcagactgttgttcaacttgaaaaaggcaatgataaagaagcaattaaaacttctaatgatgctttaaaagatgttaaagatatgaaagtgagtattttagtaaatgaaggttccgcaagtgcgtcagaggtctttacaggagcaatgaaagatcatcataaagctaaagtgtatggctcaaaaacatttggtaaaggaatcgttcaaaccacacgagaacttaaagatggctcattattaaaatatacacaaatgaaatggttaacacctgatgatcattatattcatggaaaaggtattagaccagatgttacaattgattctcctaagtatcaatcattaagtgttattccgtctgataaaacatattctgttggcgataataataaaaatgttaaatcaataaaaattggtttagatgctttaggttattataacggagatgaatcaaaccaatttgataatcaattagctaatactattaaactattccaatcaaataatcaactatctgaaacgggaaaatttgataccaaaacaaatgaaaaattcactcaattattagttgaaaaatcaaataatgaagacacggtcttagataaattattaaaattaataaaatagaaaggaatatctattatatgattagactaggtaaacatgaagatattaatcaaatcgaaatattagtgtcagaagcaaaagatttaatgaaatcatttgggaataatcagtgggacgataagtacccaactcctgaacattttaaggcagatattgatactaagacgttgtatgttttagaagaaaataacactatttatggatttattgttgtcgaccaacaacaatcagagtggtatgataatttagaatggccaattgatagaaataacgcttatgttattcatagattagttggttctaaagattataaaggtgcagcaactcaattatttgattttgcagttaaattagcagaagaacatcatatccatgtgattctgacagatacttttgcattaaataaacctgctcaaggtttattcgagaaatttggtttccaaaaagtaggagaaacagaaattgactatcatccattcaatagaggcgcaccattctatgcatattataaaaacatataagaatagaggttaataatcatgtctaaaattgcgtttaccggaggcggcacagtaggccatgtgtctgtgaacttaagtttaattccaactgcattagaaaaaggacatcaagttttttatattggctctaaaaacggaattgaacgagaaatgattgaatcacaaatttcgaatattaaatattacccaatttcaagtggtaaactacgtcgttatttatcttttgaaaatgcaaaagatgtttttaaagtattaaaaggtatcttagatgcccgtcgcgttctaaaaaaagaaaagcctgacttattattttctaaaggaggatttgtttctgttcctgttgttatagcagcacgttcattgaatattcctaccattattcatgaatcagatttaactcctggtttagcaaataaaatatctttaaaattttcaaaaaaaatatatacaacatttgaagatacgcttaaatatctacctaaagataaagctgattttgtaggagcaacaattagagaagatttaaaagaaggtaatcaacaaaaaggttatgaaataacagggtttgattcagataaaaaagtattacttgttatgggtggtagcctaggtagtaaaaaattaaatgatattattagagagaatcttgaagctttactacatgattatcaaatcattcatttgacggggcatggattagtagatgagtcttataaacaaaaaggatatatccaatatgaatttgttaaagaagaattaacgcatttattatcgattacagacacagtcgtaagtcgtgcaggttctaatgctatctatgaattcttgactttaagaatcccaatgttgctaataccactaggacttgatcaatctagaggagatcaaattgacaatgctaaatattttgaatccaaaggatatggaaaaatgattccagaagatcaacttacacaattcaaattactcgaacaactaaaacaaattgagtctcaccgtaatgatattattcatcaaatggaatcttataaagaaagttatactaaagaagacttatttaataaaatcttgaacgatgcgctttaatataggaggaccaattgatgaatagaacgaaacgcattacattgctcattgtttttacattaatctttggcatcattgcatttttccatgaatcacgtttaggcaaatggattgataatgaagtatatgaatttatttatgcatcggagagttttattactacatctattttattaggtgcaacaaaaattggggaagtatgggcaatggtttgtttgtcattaatgcttgttgcttatttaatgcttaaacgttacaaaattgaagctttattttttgttatcactatgtcactatcaggtatattaaatcctttactaaaaaatatttttgatcgcgaacgtccaacattactacgtttaattgatatttctggatttagttttcctagtggacatgcaatgggttcgacttcattttttggaagtgcaatgtatattgcccaacgtagagcatcaggaagtacaaaaggtgttattatcggactatgtgcggcacttattttactcatttctatttcaagagtttatttaggcgtacattatccaactgatattattgcaggaatcatcggaggtgctttctgtatcgttctttcaactttagtattaaaaggattatatgagcctacaatcttataaacaataaataagtgcgccttatttggcgcacttatttattatttacgtatcgttttaaaacgaacgtttattaatatttacggacacataaattaaggggggaatgacttgaaaatgattataattctaagtattttgaattataggggaaacttagaattaattgataatcattttcaattaatattataacttattgataatgattgtcaattaaaattttactttttattttattcattctagtaacaaataatttttatgataaaatattggttatattacgagaagtcatacgtttattaaaaaagaggtgtctgaaaaaatgactaatattttaatcgtagaagatgaacaaaatttagccagatttcttgaattagaattaacacatgatggttataaattagacatcgaatatgatggggaacctggtttagaaaaagcattaaataacgattttgatttaattattttagatttaatgttaccaaatataaatggactagaaatttgtcgacgtgtacgccaagtgcaatcaacaccaattattatcatcactgctaaaagtgatacttacgataaagtgactggattagattatggtgcagatgactatatagtaaagccctttgaaattgaggaactttttgcaagaattcgcgctgtattacgtcgtcagcctcataaagatattatcgatatcaatggtatcagaatagatattgatgcatttaaagtaactgttgatggcaagcaattagattttactaaaactgaatatgatttattgtatctattagcaacgaatcgcaatcacgtattacaacgtgaacaaattttaaatcatgtatggggatacaatagtgaagtagaaacgaatgtggttgatgtatacatcagatatttaagaaataaattgaaaccttttaataaagagaaagtcattgaaactgttcgtggtgtaggatatgtgattcgataatgaaaaatcatacattgcaatataaatggatgacaatcactacattgattatgtttacgacaattattttattttgtcttattattatatttttcttaaaagatactttaagagaaggagaagtggaggaagcagaacatagtttaagtgatattgtcaatttaattcaaacgcgtccgattaataatatatcgatattagatttaagtgcttcattagaaaattatgaagaagtcattatttacaatcatataggtcaaagaataatgaaatcatctaatgaaagtacaattcagtttatacctaacaacaatttacaaaagaccgatcgaattcaggtaatgcgaaataatggaaaagaatatttagttattactgaaccacttcatagtccaaactttaaaggttatagcgtacttattcattctcttgagcattataacaacttagtaaaatcactttatattattgctgttgtttttggtctactcgctacagtgattactgcatgtattagctatttcatttctaaaaacattacaaaaccgctagtaacaatgtctaataaaatgaatcaaatacgacgcgatggttttcaaaataaattagaacttgatacaagttataaagaaacagataatttaatagaaactttcaacgaaatgatgtatcaaattgaagcctcttttaatcaacaaagacaatttgttgaagatgcttctcatgagttaagaacaccacttcaaatcattcaaggccatttaaatttaattaaacgatggggtaagaaagatcctgacattttagaagaatctttaaatatttcattagaagaaatgaatcgaattacaaagctagtagaagaattattattattaaccaaagataaagtaaatatgcaatccttagaaaaagaggacgttgatatcaatgaagaaattcaatcacgaattaaggcacttcaacaactgcatccagattatttatttgagattgaattagaacaaaaacctttagttttgcaaattaatcgtcatcaatttgaacaattaatcttaatttttatagacaatgctatgaaatatgataaagagagaaagcatatatgtattaaaacacaattgcgtaataaacaaataagtattgaaattaccgatcacggcttaggcataccaaaagaagatcaagaatttattttcgatcgtttctatagagtagataaatctagagcaagaagccaaggtggtaatggtttagggctttcaattgctgaaaagattgtgagtcaatatggaggttacatttctgtagatagtgaacttaatcaattcacaacatttaaaatcaattttaaataaaaacacagatgataataatctgtgtttttttattaatataaaattaaaaaaatttatctttattgaattttttctttttacataatattcagtcaatagtctttatcaatagtcaaaatagtgctatgatagttttgtaagcggtttaactattttgtggagggtataaaatggcaaaggataaaagggatgttacggaagctccagtaaattttggggcaaatttgggtcttatgctcgatttatatgatgattatcttcaagacccaacttctgtctcagatgatttacaagtgctttttagtacaataaaaaatggcgaagcacaaattaaagctaagtctaccacagatgggagtggtacttcagcagatgatagcacaatcaaacgtgtcatgcgattaattgataatattagacaatatggtcatctaaaggctgatatttatcctgtaaatgcgcctaaaagaacgcatgtcccaaaattagaaattgaagattttaatttagataaagagacattagaaaatatttcatctggtatcgtatcagatcactttagtgatatatacgataatgcttatgaagcgttaaagcgtatggaaaagcgttataaaggctctattgcgtttgagtacaatcatattaacaataataaagaacgtacttggctaaaacgtcgtattgaaacaccttataaagctactattaatagtgatgaaaaaatcaacttatttaaaacacttgctcatgttgaaggttttgaaaaatatctacataagaactttgtcggagcaaaacgtttctcaattgaaggtgtagatacattagtgccaatgttgcaacatacattgaagcgtgctgctcaagaggacattcagaatattcaaattggaatggcacataggggacgtctcaatgttttaacacatgtattagaaaaaccttatgaaatgatgatttcagaatttatgcacacggatccaatgaaattcttacctgaagatggcagtttaaaacttactgctggttggacaggagacgttaaatatcacttaggtggcgtaaaaactacttcttcatatggtattgaacaacgtatttctttagcaaacaatcctagtcacctagaaattgtagcacctgtagttataggaaaaacacgtgctgctcaagatgatacacatcatgcgggtggaccaactacagattttcatcacggtatgccaattattattcatggagatgctgcatatcctggtcaaggtatcaattttgaaacaatgaatttaagtaatttagatggttattcaactggcggagcactgcatataattacaaataaccgaattggttttacaactgaacctattgatggtcgttctacaacgtattcatcagacatcgctaagggttatgatgtacctattcttcatgtgaatgcagatgatgtagaagcgacaattgaagccattgatattgctatggaatttagaaaagaattccacaaagactttgtcattgatttagtaggttatcgtcgatatggacataatgagatggatgaaccatctattacaaatccaacattatatcacaatattagaaagcatgattcagttgaagtgatttatggaaataaacttgtagatgaaggtattttaacgaaagaacaaatgtctgaaatgattgattctgtacaaaaagaaatgcgtactgctcaagataaaattgataaatcagataaaatgaatagtactgcaatgaataaaccagaatcgcttcagttgcctttacaaagtgatgaaaaagagtttagctttgaacatttgaaagaaattaatgatgcaatgttaaactatcctgaagatttccatgtatttagaaaattaaataaagtattagaaaaacgtagagagccttttgaaaatgaaaatggtctagttgattgggctcaagcagaacaattagcttttgcaacaattgttcaagatggcatatcaattcgtttgacaggtcaagatagtgaacgtggtacattcagtcacagacatgctgtactacatgatgaagacaatggcaatacgtatacaccgcttcaccatgtaccaagtcaaaaagcaacatttgaagtgcataacagtccattatcagaagctgcagtcgtaggctttgaatatggatataatgttgaaaataaaaatagtatgaatatttgggaagcccaatatggagatttttcaaatatggcacaaatgatgtttgataattttatgtcatctgccagagctaaatggggcgagcgtagtggtctaactttattcttaccacacgcttttgaaggtcaaggtcctgaacattcatcagcacgtttagaaagattcttacaactggcggctgaaaataatagtacagtggtcaatctatcaagttctagtaactacttccatttattacgtgcacaagctaaaagtttaaatactgaagcgatgagaccattaattgtgatgtcacctaagagtttgctaagaaataaaacagtggctaagccaattagtgaatttacaactggcggtttcaaaccaattattgttgaagatgctcaaaaagctaaagtaacaaaagtcattttagcttctggaaaaatgtttattgatttaaaagaaacattagcaaaagaacctaatgaaaatatacaacttattgctgtggaaagattatatcctttcccagaggaggacattaaaaaagctttagaagaattaccaaatttagaatctgttgcttgggttcaagaagaacctaaaaaccaaggcgcatggttatttgtttacccatatcttaaatctattgttggacatcaatataatttaagttatcagggtagaatacaacgtgcagcacctgccgaaggtgatggagaaattcacaaacttgttcaacataaaattattgaaaatagtgtcaaaaataactagggggaaatataatggcagaggtaaaagttccagaattagcagaatcaattacagaaggtacagttgcagagtggctaaaaaacataggggataatgttgaaaaaggagaagctattcttgaattagaaactgacaaagtgaatgttgaagttgtatctgaagaagatggtatacttcaagaacaacttgcatctgaaggcgacactgtagaagtgggccaagctattgcaattgtcggtgaaggtaaaggtagtacaagtagttcaagcgaatcacaaaataacgattcaaattctgaaaatgaaaacacaaaaacagattctgcagaaactaattattcaacaccacgcacttctactgaagcacaaggtagcgatacaagttcaaatgacgactcagaatcaatcaataataaaagagtgaatgcaacaccatcagcacgtcgtcatgctcgtaaaaatggtattgatttaaatgaagtagctggaaaaggtagcgatgtgataagaaaagaagatgttgataatagtcaaaaaccaagtcaatctaatcaaaatactcaacctaattcacaacaagaaacatctaaaaaatcaactgctaatacgcctaataaaccagtgatccgtgaaaaaatgtctagaagaaagaaaacagctgcaaaaaaattattagaagtatctaataataccgcaatgctcacaacatttaatgaagttgatatgacaaatgtaatggaattaagaaaacgtaaaaaagaacaatttattaaagatcatgacggcactaaattaggatttatgtcattctttactaaggcagcagtagcagcactcaaaaaatatccagaagttaatgctgaaattgatggagacgatatgattactaaacaatactatgatattggtattgctgtttcaacagatgatggattattagtaccattcgttagagattgtgataagaaaaactttgctgaactagaaaaatcaattgcagatttagcagtaaaagcacgtgataaaaaacttggattagatgatatggtaaatggttcatttaccatcactaatggtggtgtatttggttctatgatgagtacaccaattattaatggtaatcaagctgctatcttaggtatgcattcaattatcactcgtccaattgctattgataaagatacaatcgagaaccgaccaatgatgtacattgcattaagctatgaccatagaattattgatggcaaagaagcagttggattcttaaaaacaattaaagagcttatcgagagcccagaagacttattattagaatcttaatttcgtttattaaagagctaaatatattgaaaccttaatcaaaaattgataaagagtagaataagttcataatgaatttattctactctttttatgttttagttatattagtattaaaaaaattgagaatataaaaaataacagagaagcgcatccctcattatccatttatgacttttccaaagcagatgctaatatgtataaaaatgataaattaagtattatatttggacaaaaaacaacaaatatttttaaggatattccaaacgaattcataaaaaaataatagtcattaaagctacaataagttaaaaacgaactttatataatttatcaagtttgttttaagacaattaaataacctatgatatatcccccctacctatataaaacaaagtaggggagggataaaatatatattatcttatatatattttatttattatacacactttaatcatatataatatttttatttacgtatattttataataaaaaacaatactcttatttaagagttcaacatattattcatatataaaatacgttataatgtttaagaaaagatatataaatgggagtgtcgatgaatgagtggactaagaagtgttacgattggaacaagtgatctctcaaaaacacagaatttatttcataatattttaggtcttaatgttgcaacaaaaagacaagcattacgttttggtgatgctgaattaaatcctggtacaagacttcactttgtagaagttcctaatcctaattatagaaatgtacatatatcaagcgtgggattaagaacaccatcgaatgctggtttagaagaataccaacaaatattagaaaaaaataatattcaatttagttcaatcactgaattaaacggtaatcagcactttaattttaaagatgataatcatcaaatttttgatatctattctaatgaactgaatgttggtgttggattaggcacacctacttttgaaagtgctgttaatcctcttcatcaaattcaaggattgggaccagtaattattaaagtaaacgaattattggttacaacttctatctttaaaaatgtatttaatttaacgcattatgctgaatatgaatctactgaatttcctgatcaaactgtccaggtatttaaaatcggagatggtggacttggtggagaaattcatttatatcaatctaatgatcaagttgaattaaaagaagaaggaattgtggaacaaattgaattcagtacaaattcaactgaagactttgaacatgcacaaaaagaactggatgaaataggtattccttatcaaatattaaatcaaggtgatgctcaatcgttacgcattactgaaggtagcggcatctctttcatatatactttagaaaaaaattaatataaatcattttattggaggatttaaaatgggaatgttacatgaagattggaaatcacgcacaccaattaaacaagtgatggtagttaatactgatgcaaaaaaattcacagtatcagatatgcttactattggaaaacaatatgatgtcatcaatgaaactgaagaatattatcaaatcattgataactctgatctagtaggtggttattacaaagattattttaaagaagtttaaatacattcaatttctaaaaagataacgattaaattaagactcagagtgatgtgccaatatctatacatttatacacgctcttggtctattttttcatcttataaaggagaatattaaaatgccaaataatcattatatcaattcagatcaatctgtattcaatgatgcaaaagcattgtttaatttaaataaaaatattttattaaaaggccctacaggctctggtaaaacacgattagctgaaactttaagtgaagtggtccaaacgccgatgcatcaagttaactgttctgttgatttagacgcagagagcttattaggttttaaaacaataaaaacaaatgaacaaggtcaacaagaaattatttttattgacggcccagttataaaagccatgcgagaaggtcatatcttatatattgatgaaatcaatatggctaaacctgaaacattacctattttaaatggtgtattagactatagacgtcagttaaccaatccttttactggagaagtaattaaagcagcccctggtttcaatgtaattgctgcgataaatgaaggctatgttgggacattaccaatgaatgaagcattaaaaaaccgctttattgtcatacaagttgattacattggaggagacattcttaaagatgtcattaaacaacaaagccaacttcaagatgatgatataattaaaaaaatcattaaatttaatgaagacttacgtacaatgtcaaaacaaggacaaatttcagaagaagcagctagtattcgtgcgttaattgacttaagtgacttaattacagttatgccaatagagagagcaattaagcgtacaattatcgataaacttgaagatgaacgcgaacagcaagccatcagaaatgcaatcgaactaaacttttagagagggattattatgagtgatcgttttataaaatttaatgatgagcagctagatgctaagcaagtcatgatgttacaagatttagcgcgcttactactgaaaaacgaacaaactaaagtaaaaattcaaaagttcccttattatgatcctattaataatactttaattacaagttggttttggtctcatcgtccaaaagatattgaaagtgcagggttaaaaacagatgttatgctcgctgcatatggttataaaatgatggacgaagctatcgtaaatgaagtccttcatgataatgaatttagccatcccaaattttatcatcaactctttagattgctagaagatatgcgcgtttttaattttattaaagtggatcggcctagcactgctaaacaaattgatttaagagtgaaaactcgattatcttatacggaatcacaaattaaattctataaaacaaaaacggtatatacagatttacttttcttatatttagagcgagcatttttaagtcaaaacttctttgatatacccacgatacatccacaattagatgacatattaaatcatatgtttcaatatttacctgattttttccaaaatgaatcatctgaagataatatgtatcttgcacaacgtatcatgttccaaatcgatgaaatgttatcacatgatatgttaaatgaatattatcatcttcctagaaaagtatatgaagctattcatgaaatgtcttatgaggatattaaacgtatggatgcaagtaacgttgatgggcaagataatacaaatcaagaaactgacactacatcagccgaagctgaaacaaacgctcaagatagtaaatctgaaggtggcgcttatcttgaaatggaattacatgaaggtgaaaatagtgacgtcatgagtgataacgacactgcacgtgaaggtgattcaactgacgatatgacagatatgatgacgaaaaaaggacgtggctctaatcattcacttgatcgtgacgaaggcggttctataggttctaatccatcatttgctttacgtggtattaatgaaaatgtcgaaatagaatggaaagtgcctgatatagagccagagtatatttcaagctaccaacaagttaaaaatgaagtacaatttgaaactaaagatttaattcagattataaagaaaaccatcgatagagaacacgtggacgaacgtcataatttgactaaaggtcgtcttcaacgtgatttaaccaattggtttattgatgatcaatataaattgttttataaaaaacaagaccttagtaaaacattcgatgcgacttttacattactgattgatgtatctgctagtatgtttgataaaatggaagaaacgattaaaggcgtcgtattatttcatgaaacattaaaagcactcaacgttaaacatgagatacttgcttttaatgaagatgcttttgactctgatgatcgaaaacaacctaatatcattgatgaaatcgttcattacgatcgctccatcatggaaaaaagtggaccacgcattatgtcattacatcctcaagatgataatagagatggcgtagctatacgaattgcaagtgaacgtttattaagaagaagtcatcaacaacgtttcttaattatcttttcagatggggaaccttcagcatataactatgctcaagacggtattttagatacgtatgaagctgtggaaatggcacgtaaatttggaatcgaagtatttaatgtctttttaagccaagatccaattactgaagatattgaagaaaccattcataatatttatggacaatttgcattatttgtagaaggtgttgaaaatttaccgagtcacttatcaccattgctaaaaaaattgttattaaaatctttctaatcataatcaataattaaactgtatattgatttataatattcaaatttttgtgacatacatagacttgtaaattctttttgtgctagaatgttaaatattgcaaacatatacataaaaaggagcaagtctatgaataaacatacttggattatcggctttacgctatttgctatgttttttggcgcaggtaatctaatttttcctcctaatttagggcaagaaagtggtgcctatttttggccagcaattttagctttttgtttgactggaataggcttaccattacttggagtagtcgttggggcacttgataaacaaggatatattggtgcctttaataaactgtcaccgagattttcagttgtctttctaattattatttatttaaccattggacctctatttgctataccacgtactgcatctacgtcttttgaaatgactattacacccattactcattcaaatagtaatatatctttattcatttttacacttatttattttattattgttttatatttatgtattaatcccggtaaaatagtagatcgaattggatctttattaactcctttattattaattacaattttggctatgattattaaaggatttgtaaactataagggacacggttcatctcatggaaatccagaaacatattcttcaaatatagaaagtttttcccatggctttattgaagggtatttaacaatggatgcaattgcagcaattgcattttcaatgattgtggttaatgccattaaagcaacaggagttaaacacaccaatcaaatatttaaacaaacagtgatagctgggtttattgccgccttagcattaatttttatatatgtttctttagggtatattggtaatcatatgggaataagtcaaaatacgattacaactctaatggctaaaaatcaaaatataggaacttatttacttactacaatggctacaaatggctttggtgttctaggcaaatacttactaggtatcattgttgctttagcttgtttaactacagcttgtggacttattgtatctgtgagtcaatactttaatagtatatttccaaaaattagttataaggtatatgttataggttttacaattatcagttttatattggctaatttaggattaaattctgttataaacatgtctgttcctgtattaagtattatttatcctgtagctattactatgattattttaatcttacttgcgcgttttattccaactaaacctattgcgcaacaaatacctattatcattgttagtcttgtttcaattgtaagtacaataaatacgttaggtttaataaaattaaatgttataaatcatttacctcttaagcaatattctttagaatggttacctatagctatcatttcaatcataatagggtatatcgtatctaagtttataaatcaatcgtatattgtttatcaaaaggaatagatatactaaacaccggttacttctttaaatgagagcaatcggtgttttaattttatctattcttttttcatagtaagtaaatgttcttttaactcattctcgagttgtgataattctctttcagcttgttgacgtttttgacgtccattatattgaatttgcagtgtttgttcaatcgtttcaatgatgtcattttgagtcgctttaagcgtttcaatatctacgataccacgttcattttcagtagccgtttcaattgcattttgttttaacatggctgcatttcgagtaagcaagtcatttgtggtatcagtaactgcacgctgagctgttacagcatttttttgtctcattaaagtgagagcaatagccatctgatttttccataaaggaatacttgtgagaatagaactttgaattttttcggctaatgcttgattcacattttgaatcatgcgaatttgcggtgctgtttgaattgctatttgacgtgataattgtaagtcataaatttttttatctaatcgatcaacaaattgctccatatcagcgacactttgaatatccatttgattaccagattgttctgcatgttgacgcaatttaggcaattcattagcatttatgtcttgttttttacgctgtgcagcagcaatatatagagaaacatcatcaaaatatactttattttgttcataaagatggtcgagtaactgaatgtctttagttaaatttcctttatgcttatccaattgaatggtgattctatcaacttgtgaacttacagattgcattctagagaatacttcatttattgaagcttttgttcgtctaaataaacgtttaagtttagattgattgtcttgattcaagtcatcaggattaacttcacttaacttagacattaattgatttaaagtatcaccaataggacccacatctttcgattgaacttcatctaacatttgatgtgaaaattgagacatgttctgctgtagatgtgtcccaaaagataataggccttcactatctaatggtttgatttgttgactaattgaatcaattttttttaaatcttgttcgttaaattgttgtttaaagtcttgcttaacattttgagttgaaacatcatgcgtttgatgatctatataatcatctaatggatgtgagttaataaattggtctttttgattcatttaaaaattctctccattccttatcttaactttaaattattattctttatatcgtttttgttgtaaccgattaagttccatttcaatatctaaacgctcataatcatcttcattaagtctttttaaatctgcaataagtgtacgtttcacttcatctaaagtaatacgtgttcgctctaatttttgcttttctttagcagatttttttggcattttagacaaacgggtatatgcatcaattaaatttagtgcattatctatatgcgaataaaagaaactttctaccttgaagaatgatgaaggtctctgtttaacagcaaaatgaatagacttagaaattttataaatatcattaatttgacgaaaatctttaatcgatctgatattaatatatgattttaaaatattacgaattttattatgtgattgattgagttgctgattaacaaaacgatagtctctacgtgataatccaatttcatttaaatattttttggatgtcaatctttgagtaggaaaataagatacaaaaaacattccaatacctattagggcatcaagtataaaggataaatcaaatccaaatacacttgtcacccatgagataatagctattggaattcctactaaaacacccagaagtcgagaaaggttatatctcaatattcatcttcctttatttaataaatcgttttaaattctgagtatctatttgttgtgtctaaatcttcaatactataatcagaaactgaagatgcaggagaagcaccagcaatcactttatcaataaatgattttatttgttcctcgtcaccttgagcatatatatctacataatcctcaacattttgaacagtaccaaatatatcaagtttttttgcaattaattcagtatgatgacggaaccctacaccttggacagttccaaatacttgtatatgtttacgttgcatcattatcacctctacattatattatacgtatttttcctacaaaaaactaataattaatacacatatcatctttatctcaattaaaagaacgaagtctttaagcttgaattcgtctaaaaaaaagttacaatatttattagagttttaatttgagaggggacttagtcatgtggacagttgcaaagattcgtgctgactacgagggatggtggttatttagcgactggacagaaaaaatcgtagaacaacatcattatagtaactatgaagaaatgttaaaagattatcaatcaattattaaaaaaagtaaaaaatattataataattatgttattgggaaatataatatttatgcattttataataattgtgatttaaatttttgtgaagattgtgatgaagatttacaaatattttatagttttattgttttaaataataaagaagtttattataatctaccaaaaattaattaaaagagaattttctataattgtattgcaatttagttcaaactaacatataatagttaccaagcaatagttttattccatattgcaaagaatatctgtaatattgattgatagcattttgttatttatacatatttataacacgtattttttgtaatatgcgaataatgcatattgaatgaattttagtcttggaggtttcacaattatgaaacaaggtacagttaaatggtttaacgctgaaaaaggttttggcttcatcgaagttgaaggagaaaacgacgtattcgtacacttctcagcaattaaccaagaaggttataaatcattagaagaaggtcaatcagttgagtttgaagtagttgaaggcgatcgcggtcctcaagctgcaaacgttgttaaactataatttatagattgcaaaaattgactttagtaacaccttaccaagatgtagggtgttttttatatataattgaggctgggacataatcccagaaaaatagccagtaaatgagttttaaaaaactcatttactggcttctttatttatgatactttctgttattggatcattttcttaaagaacagcttcatcctgttccttcaagtatttcgccaacatactttatcttcaattaaaacaattcttgatatctgaattcaatgaattcaaatatcatcatggtgcaacattaacgggtaagtataaactttttcgttattttattttgtatcattaattattaattgacgtaatgattgacgtttaataacttcacgtgcttttccatcttttaagaagaaaacaggtggtttttgcatttgattataattagatgccatagagtaatggtatgcgccagtagataaaatggctaaataatctccacgttttacagaagaaggtaacatagcatctcggataataatgtctccagattcacataactttccggcaatagttaccgtttcgtctgcctcctcatgacgatttacaagtaatgcttgatattttgctccatataaagcagttctaatatgatcactcataccaccatcaatagaaacatatttatttacttcaggaatgtctttaattgttccaacttcatataaagtaatgcccgcttcgccaacaattgaacgtcctggttcaataccaatttcaggaacgtcgtagtttaatttttctgattcagatttaatcgcatctgtaatttcagcaataccttcttcaatagggaagctcacatcgccttcgacatatttaataccaaaaccaccacctaagttaagtaattcaacttggatatgatgctcattaagccaatttaaaacaattttagctgtttcaatcatagcttcagtaccctcaatttgtgatcctacatggaaatgtattccttttaaatgaagatgctttgatgctttgactttttcaactgcttgaattgcaagaccatggcgaattgaaagaccaaatttactatcttcttgaccagtttgaataaattcatgggtatgggcctctactccaggattcacacgaatgacaacattaactgtatcacttgcatagcgatcgattaattcaatttcttctaaagaatcaataacaaagtagccaacgccactttctaaagcatattgtatttcacgtttcgttttattattgccatggaagtggatgcgactaggatcaaatttagcctctaatgctgtataaagctcaccttcagatacgacatctaattgtaagttttcttcttgaactaactttaccatttgaatgcaagtaaaggctttagaagcatatgaaatattgtattttaatccacttttttgaaaagcattatgaaatcgacgcatttgattgcgaatttcatcttcatcataaacaatggtaggcgtaccaaaactttgagctagtgttttcaaacttgtacccgccattgttaattcaccataatcattatatttaactgacattttatctaaactcctttataagagaatcatgattcatcgcactaagttgttctgaattagcgccaacacctttgaatgtgtattcatcaatgcgtatatcattattatatagtatcacttcatcttgtgcatgaacatcatcatcgacttcaacaaacatgtgactcatcattaatgctcgaatagggtaacgtttaccattaattaatgcttcgtgtgttgcacgtttttttaaaataccatcaccatagccaatatcaacaactgcaagatgtgtatgatcatgcattgcttcaaatgcaaaactataaccacaataatcacctttatttacttcacgaacttgaattacatttccttttacggttaaggcttgttcaatctcatgttcatctaatttgctatatggtcttgaaccatataaagcgatacctacacgtgcatgtgtatgatagggaagaagttgttgtccttcgcgataataactcgcactgttttgcgcatggataagtttaaattggtatccttcatttaataatgtattaacgacgtttaaccatgcttcccgttcaatcccatactctggaacatcaaattcatctgcatacccaaaatgcgtccataggccaacgatattcattttacttccattatcattttcatgatgatgaagtacttctttaatttcgtcaagatttttgaaacctgaacgatggagtaaattttcaaattctaagtgaacattaatatcttttaattcacttttgtactgataataatattctaaagagggaagcgtcatttgaatattattatttcgaactgtatcaaagtcataaactgcattcattaaaaagattgtagcatgaggcgcaagtttacgaactctcactgcttcttttaaggaagtagtactaaatgtatggatacccgcttctaaaaatgttcttactgcaaactctaatccataatgataagcattattttttacaactgccattattgattgattattctttactttagttgcatttcttaaaaatatttttgaatcaactgaccaaactgctgtcaatttaatttactcctttccataatggttcaatatttgttcatagtaattggcaacatcaataagcactttttcgtcaaaatttaaatgcgatgtatgtaagcctgtgataaagcctttatcttcatttcgagttcctacaaaagcaaagtaagacggtgctaattgttggccataaaaactaaagtcttcgccgaataaaaatggcagaggcttttcaataacttctaaattagcagatagaatagatttttcaacgatatgacgtagtttaggactattcattgtagcaggatatccttcttcaaatttgacttcacaatcaacattgaataataatttcacactttttgcaattttattcatttgatttttcacaatatttaaatcagtggcatcataagtacgaatagttccttctaaataaccgttactaggcaccgtgttaattgcttcgcctgcattaaagtggcccatatgaacaatattacgttttagtccatttaaatgatattgctgtatttgaccaacttgatttaaaacatgaatcagtgcttcgccacatgaatgaccttgctctttatcagctacatgactagataatccttttaggaaaaaacgatattcagtggcacttgctgtaatttcttcatcgcgtatcacgacttgtccttcctcagcgaaaggattgacatgaatgccaaatactgcttcaataggatattgattaaaagcacctgctttaattaagcgatttgcgcctccgcctgtttcttcagctggttggaagataaacacgacattatgaggtaattgatgttgatcagccatcaccttacatcgtttaacaaataacatcaatgctgttgtatgaccatcgtgaccacaagcatgcatcacattatctgtttgactacgataatcgacattattttcttcaaaaatgggtagggcgtcaatgtctgcccgaaatgcaattgtatggtcactattaccttctaaatatgcaatagcacccgtttcaagaggttgttcgtaaggtacatttaattcatctagaaatcgagtaatatattgagttgtctcaaattcgtgaagacttaattctggatgttgatgtaaatgtcttctatgttgtgtgacaaattctaattcgctcatcttaatcaatcctttattcatttattattcaacttatgtattcatttaattgtaaaggctgagaacatgttgtcccagcctttagcattcaattattcaagtttgtcattaatcatttaattttcttaacgctgcaacaatttctcgtttagagtcttgaacttcagatgtttgtttaatgactttagcaggtgtaccagctacaaccgcaccggcaggaacatcttgagtcacgatagcaccagcagctacaatagcgccttcgccaactcttacgccttctagaataactgcgtttgcgccaattaatacattatcttcgattactactggagaagcactaggtggctcaataacgcccgctaatactgcaccggcacctacatgaacatttttacccgttgtcgcacgaccacctaatgttgcattcatatcaatcatagtgccttcacctacaacagcgccaatattgattgttgctcccatcatcacaacggcaccgtcttcgataatagcttgttcacgaatgaatgaacctggttcaatacgtgcatttgtattggttaagtcttttaaaggaatagcagaattacgacggtccatttcaatttctaagtcagtaatatgtgattgattggtttcataaaatgttttccaatcatccgcttcacaaaatattacttttgaatcatcagatccgaatactttaaatgtattaggaaaagtgacgtcattgaattgtccatttacgtatacttttaatggtgttgattttttagcatcactaatatattgaataatttcttgtgcagataagtgttgtaccatagtttagaatctccttaagttattttataagttgtcaaatgtatagaaaccatttgattttgtgtttaatttttcagcagctgtaattgcgccatttgcaaaaatgtccttagattgcgctttatgagaaatggtaattgtttcatctgtgccagcaaataaaacatcatgttcgcctacaattgtaccgccacgaactgaatgaataccgacttcatctttttcacgtttttcagttcgctcatgtcgatcgtaaacaggcgttacattttcacgtaattctttaataacatcataaagtttgactagcgtgccacttggcgcatctacttttttattatgatgagcttcagttaactcaatatcataatcgtgtaaaaggggaacagctgcttctagaattttagttaatgcatggacgccataactcatatttgcactgaagaaaacaggcatacgttcgcttaattgttctaatttttgaattagtttttctttttcaccagtagtagcaatcactaaaggtaattcaaaaccttcatctaataaaggtaataatagattaggattagagaagtcgatcgctacatcagcttcattttgtgcgtctgcaatatgatgataagttttatatggtgaatgttgatgttcttctggctcaattgtaccaataatctcatgacctttttcttctgctaatctggcaacgcgttgattcattgtgccatatccaatgagtaaaattttcatttttattcctccgctttaaatgctttataagcattcactaatacatttgctttttctttctctagtggtaataaaggtaatcttaattcataatttccaaatcctaaatgacttgttagagctttaattggaatagggttgacatcaactgaaagtgcatctaacaattgaccaattggttcaaagtctttctcaatttctttcccattttgtttagcatcatagagtgcttgaaattctttcggaataacgttagcaatgacagaaattacgccattacctccgcgattatagaattctacgacattatcatcattaccactgtaaagagcaaattcatcttgatgaatacgttttttcacttcttcgtaatagttaaagtcatttgtagcatctttaatagctacaatataatcattatgacttaatgtttcgactgtttcaggatcaattgtcatattcgttcttgaaggtacattatataaaacaacaggtaacttaacttcattcgcgatagtttcaaaatgtttaattaagccacgttgattcgttttattatagtaaggtgtgattaacataataccatctacacctaattctttagcacgtaatgaagcttgaatagatttagctgtattatttgtaccagttccagcgataatagccacttgatgattaacttgtttaatcactgcttgaagtactgtttctttctcttcttctgttaaagtagggctctctgctgtagtaccgtttacaataattgctttaacattattatcaagtaaaaattgaacatgttgttctaatgctttatagtcaacttcattattagtaaatggagtagcaagcgctacacctacaccttcaaaaatatgtgccatattatctagctccttttaatttaatgacttgttctaacacttgaactgcatttaaagctgcacctttaagtaggttatctgaagtacaccaaacatggaaagtattatcaagtgagtcatcacgacgaattctacctacaaacacttcatctttacctgttgaattaatagctaaaggatattcattattttcaggattatctactaaaacaacacgattatcgttttcaaataaatctttaatttcttgaactgttgcttctttatcaagagtaacatcaatttctacgctatgactatcttgaacaggtacacgtgcacatgttgcagtcacacgtaagtcaggttgtcctaaaatttttcgtgtttcatcaatcattttttgctcttcttttgtatatccatcttctaagaaaacatcaatatgtggtaaaacattattataaataggatgtggataagcttctggagctttaccattcgcaccttcagctaagtctctcttacctttaatccctgaacctgaaactgcttgatatgttgtataagctacacgctttaatccaaaagcatcgtataaaactttgagtggcacgaccgactgaattgttgagcagttaggattggcaatgataccacgtttaaattctggttggttaacttctggtacaattaagtccacatcgtttgccatacgccattgacttgaattatcaataacaattgctccagctttttcgaaaataggggcaaattctttacttgtttcgccacctgcactcattagcacgtaatcaaatttttcacttgctgcttcttctgtaagttcttgaactgtatatgttttcccttgaaactcaatttcttttcctgctgatcttgctgatgagaataatactaactcatcaaattgaatatgtttacgatcaattgtttctaacatttttgttccgactaatcctgttgctccaactactgctaatcttgtcataaaagaatcactccatttaaatattaattgaattttaaattacttattttaacttaagtttaaatatcaaaagcatcgtataaaacttcaaccgctttattttcattttctgcatcaataacataagaaatactaatttcagaagttgttgtttgataaaatggaatattagaattaattaacgtaataaatgcttttgaagctacaccagacatatcacgcattcctgaaccaattaatgaaattttgacgtacgcttcattaattttataatctaatgcatcaaatgttgtagaaagttcctctaagatacttgaaatttgttgtacatcactatctttaatagaaaaagatagttgtaaaccttcaacatttacgatttgagaaatcatatccacattaactgaaccttcatctaaagcagtaaataattgagttagaagtcgattatctggaagaggataactaattgttacatgcatcatatgtgtatctaatgcaactccagttacggcttttttttctaatatttctgttcttggcataatccatgttcctttcacatttgataacgttctacctaaatacaaggggatatcataatttttagcaagttctacacttcttgtttctaacacaccagcacctaaagcgctcatttccatcatttcttcataagacacataatctaaacgttttgcctcactcaaaattcttggatcagtagcataaacgccatcaacatcagtgtaaatttcacaagggatttgattactagctgctaatgcaacagcagtcgtatctgaaccaccacgaccaagcgtagttaactctaattcgtcgttcactccttggaaacctgctacaactaaaacatccttgtctttaaattccttgttaaatgtttcaggattaatttctgcaattcgactttttaaatgatgacctactgttttgatacctgcttgatatccagtcatagctctagcacttacgccaatatcatttaataccatcgacaaataagaaactgtttgttgttcaccagttgttaataatagagcaagttcttcatcttttggtgttgttgtaagatgggaaacatttttcattaattgatctgttgttttgcccatagcacttacgacaacaataagttgttcaccgtcatctacacggcgtttaagcatttctgcaatattttttatctttgtaaaatcggcgacagatgaaccaccgaacttcaaaacacgtcgtttcaagattttacctcctagaatttaggggcacacgtcataaaaaagagcaagttcggaatgtgcgaacttgctcgtaatttatatacaagtgatgcactccattattaaataataatgacaaactctcagctcttaaccacaaagtccaacgaacgcttactgcggttgcaattcgtttcggcatcgcaccctttctatattagccgtggcagacagtattctaatatatactaatgattgatgcgcctcatcaatttcttattcaattactatgtttttaattatacataagcaccttttaactgtaaaccgatttttgtgattttttgaaataaactgaaaattattaaagtaatattactgttaaagaaaagagatagtaataataagtaatttgtgtaaataataacaataattcgaaaataatagtattttataaaaaaactgtcgataaagttcgttatttatcgacagttttatgcatagtttaaattttaaaaatagaagataccttattaaaatcctgttattttatttttgtaacacaccaatttcttttagatattcttcatatggcaattctttagataaactacttggttggttcaagtcaatcacacgattagcgattgtattaataaattcaaaatcatatgaagtaaagataattgatcctttgaatgaagctaatccatcattaacagctgtaatgctttctaaatcaagatgattcgttggctcatcaagtagtaaaacattggcacttgaaagcatcattttacttaacatacaacgtactttctctccacctgataatacacttgcttttttcttaacttcttcaccgctaaataacatacgtcctaagaagccacgtaaaaatgtttcagtttgttcatcttcaggagcatattgacgtaaccattcaactaaattcatatctacgccttcgaagaaatcagaattatctttagggaaatagcttaatgaagttgtcactccccatttaaatgaaccttcatctggttccatttcaccagcaagtatttttaatagggtagttttagcaatttcactatcgccaattaaaatagctttatcatttggattcatagtgaatgaaatgttatctaaaactttttcaccatcaattgtttttgagataccatcaactactaataaatcgttaccaatttctctttctggggtgaatttcacataaggataacgtcttgaagatggttgaatatcatcaagttcaattttctctaattgcttcttacgactagttgcttgttttgattttgacgcattcgcagagaaacgagcaatgaagtcttgtaattctttaattttttcttcttttttcttgttttgttcttgagccattttttgagcaagttgacttgattgataccaaaaatcatagttaccaacatagactttgattttgccaaaatctaaatctgcaatatgtgtacatacattatttaaaaaatgacgatcatgagatacgacaatgacagtattttcaaagttaattaagaaatcttctaaccaactaatggcaggaatatcaagaccattggtaggctcatcaagtaataaaacatctggatctccaaataaactttgtgccaataatacttttactttttgattattttctaactctgacatttgcttatcatgtaaatccggggtaataccaagtcctgatagtagggaagctgcatctgcttcggcattccatccattcatttcagcaaattcaccttctaattcagctgcacgaatgccatcttcatcactgaagtcaggtttcatataaatttcgtctttctctttcatcacttcaaatagacgttcatgaccttttataactacacctaatacacgttcatcttcataagcaaagtgatcttgttttaatactgctaaacgttcatctttcccaagagaaacatgacccgtttgtgaatcaatttctccagataagatttttaagaaagtagatttacctgcaccattcgcaccgataagtccataacaattaccttcagtaaatttaatatttacatcttcaaatagtttacgatcaccaaaacgtaaacttacatccgtaacttgtaacattcatttactcctttattcatcgtttatctaacgcaaaaaattatatcatataatgttcctatattcgaccttatatcatttatgtcaatgatactttacaaaactcatgttataatacttagaaatacactgcttaaaggagacaactatggcattagacaaagatatcgttggttcaattgaatttctagaagttcttggattggaaggctctacttatttattaaaaggtccaaatggtgaacaagtgaagttaaatcagtcagaaatcaatgaggaagatgaattcgaaattggagaagaatatagtttcttcatttatccaaaccgttcaggtgaattatttgccactcaaaatatgcctgatattacaaaagataaatatgattttgcaaaagtattaaaaacagatagagatggtgcaagagtagatgttggtttaccaagagaagtgcttattccatgggaagatttacctaaagttaaatcgttatggcctcaatcaggagattatgtattagtcacattaagaatcgatagagatcatcaaatgttcgcgcgtttagctagtgaaacaattgtggaaaaaatgtttacacctgtatctaatgatgatatgcaaaatcaagtattaaaagcaagaccttatcgtttattacgtatcggtacttttttattaactgaggatggttacaaagtatttgtacatgagtctgaacgtaaacatgagccaagactaggcgaagctgtagaagtacgtattatcgggcataatgaaaaaggtgaattgaacggttcattcttaccactcgcacatgaacgtttagatgaagatggtcaagtcatctttgatttgttagtagagtatgatggtgaacttccattttgggataaatcaagtccggaagcaattaaagaagtattcaacatgagtaaaggttcatttaaacgtgcaattggtcatttatataaaagaaaaattataaatattgaaactggaaaaattacattaactaaaaaaggtaaaacccttattcaagaataatgagttcatgaaaaacgagtttcttctatattatatagatagttcaaaaccattgaaaggtaacactttcgatggtttttttatgggttttatttatataaaacataagttttttgataaattaacaaaatatttacaattactctattttacattaacaaaaagtatgtaatataagcattgtaagaaatacatataacattttgggttatctataattaggaggatgttttaatgaagaaatggcaattagttggtacaactgttttaggtgctactgttcttttaggcgcatgtggcggtggaaatagtggcggcagtggttcaggagatggaaaagaccttgaaggttctgcaaaaggtgaaggttcatctactgttgctccaatcgttgaaaaattaaatgaaaaatgggctaaagatcatccaagcgcaactatttcatctggtcaagcaggtactggcgctggttttgaaaaattcatcgctggtgaaacagacttctcacaagcttctagacctatcaaagatgaagaaaaacaaaaattagaagacaaaaacattaaatataaagaatttaaaattgcacaagatggtgtaactgttgctgttaataaagataatgactttgtaaaagaattatctaaagatcaattgaaaaaaatctacagtggcgaagctaaaacttggaaagatgtagattctagctggcctaacaaagaaatcaaagctttctctccaaactcaagtcatggtacttatgacttctgggaagaagaagttatggataaacaagatatcaaagctcaaaaaaatggagatactaacgttatcgttcaatcagttgagaaaaacaaagaaagtattggttacttcggttataacttctataaacaaaataaagataaattaaaagaagttaaaattaaaggtgacgatggtaaatctgtagaacctactaaaaagactatccaagatggttcttatcctttaagtagaccattattcttatatgttaaagaaaaatcattagaagataatgatgttatgagagaattcttgaaattcactttagatgataaaggtaaatcagctgaagatgctggatacgttgcttcaccaagcaaagtttataaagatgaaattaaagaattagataaatacaaaaaagattctgacaaataataatcattattaatataaagggctgggaattaacaactcatgtaaatgttacatgagttgttcaggatatatacatgggtgattgttaaagtgttttaaattaatttgaactcattcgttacctgataatttcctgctcttttttaaaatctattgggagaaataaaaagagagggttacatatggcttctaacactaatgttagagagatgatagctaaaaataacgctaaaaaaggtggattttctgataaaatcgtgccaattattttaggaattattgctgccatctctattttaacaactatcggtatactatttacgttaatcactgaaacaatcacattctttacacgtgtttcaattactgagtttctttttactaaagattggagccctacaagttctgatcctaaatatggtatttgggctttaattcttggtactttaaaaatcactttcattggtactttagtggctgttcctatcggattaggggctgcaatctacttaagtgaatatgcaagcgataaagcaagacgtattattaaacctattcttgaaatcttagctggtattccaactatcgtattcggtttctttgctttaacttttgtaacacctttattaagaacatttatacctcaactcgatagttttaactctatcagtcctggtatcgtagttggaataatgattgttccaattattacaagtatgagtgaagatgcaatggcttctgtacctaataaaatgcgggaaggtgcttttggtttaggttcaactaaatttgaagtggcaactaaagtcgtattaccagctgccgcttctggtgtaattgcttcaattgtacttggtatttctcgtgctattggtgaaacaatgatcgtatcattagctgcaggtagttcaccgacatcatctttaacattaacaagctctattcaaacaatgacaggttatattgttgaaattgctacaggtgatgcgacattcggttcagatatttactatagtatttatgcagttggcttcacattattcattttcacattaattatgaacttaatttcatactggatatctaagcgttatagagaggagtattaatatgacagcaacgactgatccaagagctaaaggtttagttgacaaaaataaagtcgaaaaaaatctatctagtcgtgataaaaaaaatagtcttaataaatggctattctttgcatgtattgtatttgctttaatcgttcttgccgcactactaattcaaacacttgtaaaaggtgtaggacatttaacacctgaattctttacaagtttctcatcttcaacaccatcacaagctgggattaaaggcgcattagctggtacattatggttaatgattactattatcccaatttctattatcttaggtgttggtacagcaatttatcttgaagaatacgcacgcgataatatgtttacaagtttcgttaaaatttgtatttctaacttagctggtgtcccttcaattgtatttggtttattaggtttaacattatttgtacgtggcgctggtattgaatcattatctttaggaaatactgttatcgctgctgctttaacaatgtcattacttatcttaccgattattatcgtttcaagtcaggaagcgattcgtgccgtacctaattctgtaagagaagcatcttatggtctaggtggaaataaatggcaaacaattagaaaagtggttttacccgctgctttacctggtattttaacgggatttattttatcactttcacgtgcattaggtgaaacagcaccattaatcttaatcggtattccgactattttcttagcagtaccatctggtttattctcaatgtttactgctttaccaactcaaatttatacttgggctaaaatgccacaagctgaattccaaaacgtggcatcagcaggtattatcgtattacttgttatcttattattaatgaacggtttagcaattttcttacgtaataaattttctagaaaatattaagcattttattattaaagttatttgggatagagagaaaggtttctgctttctctcttaaaataaaaggagttttatatatggcaaaaatcaatgtagatgaaaagaaaaagaacgttgaacaacatacaaatgatgttgttgatcaacgctcaaatcacactcatccaacaaacgacacacaacaacataacgacaatcagtcgcaaaagacaacaattgtaacaactaataatgaaaataaaaaagatattaaacctgacagtgaaagaaaagtagtttattcaactcaaaatttagatttatggtatggtgaaaatcatgctttacaaaacatcaatttagatatcttagaaaataatgtcactgctattatcggaccttctggctgtggtaaatcaacgtatattaaaacattaaatcgtatggttgaattagtaccatcagttaaaactgcgggtaaaattttatacagagaacaaaatatttttgatagcaactattcaaaagaaaaactaagaacgaatgtaggaatggtattccaacaaccaaatccgtttcctaaatcaatttatgataatattacttatggtccaaaaatccatggtattaaagataaaaaattacttgatgaaattgttgaaaagtcattacgtggtgctgcaatttgggatgaattaaaagacagattacatacaaatgcgtatggattatcagggggacaacaacaacgtgtctgtattgctagatgtttagcaattgaaccagatgttattttaatggatgaacctacgtctgcattagatcctatctctactttaagagttgaagaactggttcaagaattaaaagaaaattattctatcattatggttacacacaacatgcaacaagctgcacgtgtttctgataaaacagcattcttccttaatggttatgtaaatgaatatgacgatactgataaaatcttctctaatccttcagacaaacaaacagaagattatatttctggtcgtttcggttaatgcttaatgaaaattattagacaaaaatatgaaggccaattggacgatttaattaaagaacttcgtcgtcttggtcttcgtgtttattcaaatgttaacaatgctattgaatcattgagtgaagatgatagaaactttgctagacacgtcattgaaaaagataaagaaattaacaaatttgattatgacattaacgaacaagtaatcatgttaattacgaaacaacaacccattgctactgatttaagaatgatgatggcagctttaaaaatttctactgattttgaaagaatgggggataatgctgcaaatatcgctcatattcgactaagagtaaaaattacagatcattatgtcttaacacgtttaaaaacaatgggtaaacttgcattattaatgttagaagacttaaatactgctgttaaaaatgaagatttaacattgattaaagaaattatcgaacgtgataaagatattgacgatttatacgtgaatattgttaacacaacttatctaattgataatgatccgtttgtagctggacaagctcatttagctgcacgtaacttagaaagagtaggggatcatgtaagaaatatagcagaaagtgtttattattactttactggtgaacattttgataaatatgatcgttaaactactttatagttgatagttttattcaaactaaaaaaatcaaagtaaaggagtgagacactattcaaaatgaatagtgtctcactcctttataatacattaattatgttcgatttcatttgtaagtatttctacttcatctactaattctgaaatatacacaatagtagatttaagtggggcatttgttgttatatcaacgcctgctacttttgcaagttcaactggatttttacttcctccagcttttaacgtttctaaccatgcatcaactgctttttgtccttctttttttattttttgagagaccactgtgccaatagttaatccagctgaatacgtatatgaatataatcccatataataatgtggttgtctcatccaagttaattccatcccatcagtaagttcaaccgcatcaccaaagaattgttcataaacgtttctcattaacttattaagaaccggtgctgttaaagattcaccgttatcaacttttttatatacttctctttgatatgctgcttctagtaaatgcgtgaccatattatgataatatgtgcgagatataattgagccaatcacccatcgtttaaaacgagcatcattactattactaaataagtagtttgccattagcatttcattcattgtagaaggcgcttctacaaaatacatagatgcttctgaatctaataaatgttgatgtttttgtgacaatgtaaaatgaccagcgtgacccaattcatgcgctaatacgaaggtttctgccattttacctgtccatgaaataaatacatatgaatgcgtaaaataagggctagcacaatacgcgccagtatctttacctttattttgagcaaaatcaatccattgatgattataagcattatcaaccattttaatatagtcatcgcctaaaacacctaaagcaccgtgaatatattgttttgagtcttctattgaaatatctggttcataacttggatcaactgatatttttaaatcttcaaatcgcattttatctaagttatgaattctttgcagtattttggcatatttttgcatcacaggtgctaaatcactcatgatgacatcaatttgtctatcatacatttcacgtgtaacttcttgttcttgtagtaaataatctataacagaatcatagcctcttaaattagcctcaattttttcttgttgtacatgttgattatatgttgcagctgttgtgtgttgatatttacgtaatgcattactaaaagcttcgaaacttttacgtctaaactctggatctgaactgtcttcatattcgttttcaaaagttgcataatctaaaggatacgtttcatgattatgttcaaacgattcaaacgcaatatcaagcattttagttgttccatagagttcataagcactttgaaaagtaggtgacaaactagcaagcacttcttcaacttctgaagataattgataaggtttacgttttattaatttttctagataatgaggactattgaactgttcttttagctcttttaatttatcatcagagagtatcattatttcagattcaacaaatgataataaactagatatcttaccataagatgttgatagtttggcatttaacgtttgcgctaattcatttgtagtatcgacacttaatctaagttcagcataattacctaatcgatcaaattgtataagtaagtcttcatatgctttaagcgcatctagaataattttagtttccgataaattatttttatatttttgattaaattgagcagatttctctaatacatcatttaaagtattataaaatgcttcatcattcgtaaataaatcttctaaattccatttttcattatctggaacatgttttctgagtggtaagcctgtgttcattttattcactcctaaatagttagtctcatatatattatacataatattatttgtaaactcagttttaagcctttagtctgagtcattttaatgactaagaaggtataattatttataaaagtattgtatattacatattataaaatataaaagttgaggcgttttttatgacgatatttgatatgccaaattatctttggatcacaatcgtagcaatgatgatattaactgtcttttgtacaatggtactaaaaaaatggttttcagcagcagtaattaccttcgttgttttagcagtattagctttctttattcctaatttttataatataacgttccagcctttattaggctatgcggcttttcttgccattataagtttaatgattagtttccttttatggtattttacaagaggatggcgccgagaacgtaaagaaaagcaattggaaaaagagatgaaaaaatatgatcacgacgagtacatgtatcgccgtcgtgatagaagataaatataagggagtaggatagaattcattttgaattcgttatcccactcctatttatattattaatggtgtataacatgattattttctaaaggctttttcaattttatttaattgatgaatagttgtttcaataccaccttcactaaaataccaagcgttagcttcaaattgatatacttggtgattttttattgctttcatatcttttatcactttattatttaaagtagattggtggcgatttctttaatacgtgtattagacttgaaataagtgccttattgattattcgatgattttttaaaagggtatattgctcataataccgaaaaggtatatttagtaaaatcgtcttaataaacgataatcaaacttataagaatggatcatttttttgatataaaagtcattctttgaaataattgttattataaatcatggttccaatatcatcgatagaccgtaaattgataaggtagaacaggtaataaattatttatctgcaaaaataatttgatatcttacattatgtaaactaaataagcattcaataattgattcattaatatattcattatcaaaatatattgtgtcataaatatctacgttatatataacgtagatgatttttatcataataaattataactaattcaatcgttttagatagatcaatgttaaccaaagaatgataactaaaatatatcattgcagtgtcattaaaatagaataggtcccctaattgttatatacataacttcctataatatatattatgtaaactaaattgttgaaatctgtatttttatatgaatatcttcaatttaagctttttaacaaaatacagatatttaaagttttaatatattccttaactcatttacatatgcccatgcattctaattttatgagtatttatttaaagttattatttttctacagttcggtaatcaatatctaaagtattgaatcatggttgtcgacattacgattcatacaatcattcttaattatttgataaatcaatcaaagcggaatgatttctattagattagttatttgatgatataatagctatgtatttatcatttgaattataaaaagatataaaattcattttttataaaatatcaaaaacaaatttcttttggtgtatcattgataaaaatgattgatatgctattattaatttgtaggatgcaacttgtatttacaacttagaatttacctacactatttataattagtctctatcactaattataaaaagcatactggcaagattgccaatatgctttttattctaattgttattttttaatcttcttacgtatacgattcaatgttttaaatagccaatatttaggtttattaattggtttatagaagtctccaattaactcctcgatatacacattaaaccctcttttaaagcgataaacaccataatcttcactattttcagtgaaatcaccagataaaccataaaaattatatcgatcatatccatggtcaaagcaataattcatcataaaccaatgcatcatgtatggtcccatataattattgtatttttctgatgagccgcctgagaaatagtttacttcataagcatttgcaaagtatactccagaagctaagtttaaaatttgtccatcagtttgacgtaattcacttgcatgtaagagctctttttggtcatgttctatttgtttatctaattcagcaatttttttcagctgtttgtcacttttattgtctttagacatcatttgatcacgacgcgtttctttatcatttaaagaggtttgcaatgatttaatatagtcatctaaatcaatatatgctaatggcactaatgctttatcgccgtatgtatctataaaattataaaaatattcatctgtttttgaaacaaaaccggtacgtgcttctgtttcacgatacaagtctaagaaaatgtttagttcatctcttttaagaaatcttacttttactccatagtttatcgctttatttatatttcttttacgttgactatcaaactgctttttcaatgatgcaggtgtttcaccttttagataatttacacccatccatctcacttgactagagcgatcatatttcgtagtgaaaccatgatgttcgtaaccatgtgatttaaataaattaactaaagcatcatttttttcgtgaccttcaaccggattgatatctttatcataaatttgataaatccaatatggatcaagttttacatataaacattgatgttggtgtaggtatttttctaattctcttaggtaaaaatcaacaagacctaaatcggaataatccatcaccggtccacgatttgaatagtatacataacttcccatagttggaatttttgagaaaagacttgcagcaatcactttattactttcatcttttacgcctaataacacaacttcaaatccgtcattttctctagtttttatattttcagtaacttgaaagtaatgactctctaatgatggattttgtacgaaggtttcatattctttaactgttaactctgtaaatttcatattcgcactatccccctcttaattcaatctttttttaatttttttaagtgttgtatatagtgaatacattggtttatttataggtttaacgaaatcaccaacatattcaattacatctgcattaaatccttttttaaattttacaacacctgcatcttcagcatcatctgtaaaatgaccactaatcccataaaaattataacggtcaatgccatgatcaattgcataattaatcatagtccattgaactgcataacttccagcgaagtgtctatatttatttgacgttccacctgcataatatacaacttcaaatggattaataaagaagaatccagcagatattggtaattcgttaccatgttctaattgaagttgtgttgcttcatcaattttttgctcatttgcttttaattgctgttctaaatttatttttttattttgtgcttttttgttatctggtcgtttttcaatatcttttagagctttgtttaagtctttatttaatgtctgacgttctgcatgaagttcttcaagatattcatcaaattttatatatgcgagaggtactaatactctatctttaaaatgatcaaatcgattatagtaaaaactatcctctctatcagaaaattctttagtctctgatgtatcttccataaatgatctgaaaataggtaattcctctttagtaagaaatcttactttaacaccatttttttggacttttttagtatttctttttcgtaaactatccattccatttaatacatctttagcagttttatcctttaaatttaaaactgaatggaaccgaatttgtaatattggatcaaatcctgttgtaaaaccttcgtgttgatatcctaattgtttcattttatcgaagaaccaatcattcccagcatttcctgtaatatcaccatcatgattacgatattgataaggcaaataagggtctatacgtacatataaacaatgttgttgttttaaatatttacttaattcgttaaagaaaaagtgaacgagttctttgttttcataatcaatgactggaccacgatttgaataaaaatatttaaaaattttcataacgggtacagcagttagcatacaagcagcaatgacttcattatctttatttttaattcctactaaatgagtttcagttttctcagcaacttttaactcataattttcagtcatctgtgtaaaatggctatatggcattttttcagtaaaatcgccaaattctgtagatgttaaatttgtaaacttcattatctctataactcctaatttagaatctttatttaatttgagttgactaattttaaaattttagcttatgtatatgttgtgaatacgcatcggtctaatctcaataagtatacactagataaggttaaaactaaaatataaacctgtatacacttccaattaacctaaatgctcttaaattcttggcttctatcttctacaaataataagagctgaaaaagaatgattttcagctcttaaattcatatctaatttcattttaaatcaattaatactacattgctactaattcttaagtatttcatgctatgaatactttaaatagcttttattttatactatgctaatagttatttaaaatttgtctaatctcccttaagtattctcctgtttgatctaagtcatcattttcaaatcttcgaacgatttcacttccaataacaacaccatctacatcttttaccaaatcttttatatggtctgtagttcttattccaaatcctgctacaactggaagagctgtaaaagatttaatcatttttatctggtctttaagctttggatgaaacgttccatcttctcctgtagtagcattcatcgttacagtatagataaatccttcagcatgttttgctatattttgtatacgatttgtatctgccgtcattgctattaatgaaattatttttactactctattatcatttaattgttgttttaattgttctattaattcaaatggtaagtctggaataattactccataaacaccaatatcatcgcattttttaaaaaaggctttttctccataacttaaaataacattatagtatgtcattaggacatatttacaattaatttcgttttgatgtttatctaactcatcaaatatatagtcgattgttatatgattttgaagtgcttcatgaccagctttcataatgataggtccatcagctacaggatctgaaaatggaataccaatttctatcatatctgctccacttttatcaagtaattttacattttctaaaaattgtctattacccatgatataaggaataaataatttactcatttttgtcctcctttctttgttggatatattgttgaatcgtttccatatctttatctccacgtccagatattgtcactactaatatatcgttttgtttcatttgaggtgctaatttttctacataacttaatgcatgtgcactttctatagcggggataataccttctattttggtgaagcggacaagtgcttccattgcttcttcatcgctagcacattcataggttactcttccaatatcatgataatatgaatgttcaggtccaatacctgggtaatctaatcctgctgagatagaatgtgccaattcaatttgtccatgttcatcttggattaaatacatttttgatccatgaagcacgccagcctttcccttccctatcgcaagtgcatgttgattagtatccttacctctgccagctgcctccacaccgtataatttcacattatctttgataaaaggataaaatgttcctattgcattagatcctcctcctacacaagcaactactgcatctggcaaacgatgttccttctctaatagttgtgattttatttcttgaccaattacactctgaaaatctctaaccattgttggaaatggatccggtcctaaagctgatcctaatagataatgtgtatcctccacgtgacttacccaatactgtagcgctttattaactgcgtcagataaagttccttgaccttcatccacagcttcaactttagctcctaataattccattctacatacattcagttgttgccttttgatgtcttctcttcccataaaaacaatcaattccatatcaaataatgcagccactgtggcacttgcaactccgtgttgtccagctcccgtttctgcaacaagtttatgtttacccattcgtttagcgagcaatgcttgacctatggcattattgattttatgggcaccagtatgatttaaatcttctctttttaaataaattttagccccacctaatgtttctgtgtatgattgcgcataagtcaatggtgtttctctcccaacataatcctttaaataatatgctatctcttgttggaatttaggatcacttttggcttttttatacgctctctttaattcaatgatagctggcattaatgtttccggtacatattgtcctccgtactcaccaaaaaaacctagttcatttgcttcagtttgtatctgtttcatattctaagctccttttaacgtaatttataattgtttccattttcaatttatccttgcattcatttgtctctataccactggatatatcatagcctttatgtgataaatctagcttttcaatctgttgaatagcatttatgtttattcctcctgcaataagataaggaatgtcttggcttactgattctaatattttccaattaaacgtttgacccgtaccacccaattgaattgaaggagtatcaataataaataaatccacccatggcttatattgattaatatctctattcaaattttctgtagccggcaacgctttaattatcttaatattcttaaaattcaatttaactttttggattaattcaattgcttcattaccatgaaattgaatggcattcacattggtttgttgcaacaatgtatttaattctttatatgtaggattcacaacaactataactcgatgaatgtgctttgctacaaattgatttaaatagttaatttgttctatatttaaatgacgtttactttttggataatgaataaaacctatcatgtctatgtctaaggaattgacttttaaaatatcactttttgttttaaaaccacaaaattttagtatattcatttctctttatttagttttaatgaaggtaataacgatgatatattattactattcattaaagctcctcccacaagtaatccgtctattccactacttacaattttttttacatcatttaaagttgtaataccactttcagaaatatagtaataaccttcttttttcatttccaaaatgtcattagtatgttctactttagtaataaatgtttttaaatctctattatttactccaatgattttaggtttaatttgatatgcgcgttctaactcttctttgttatggacttcaactaagacttctaagttttgagacattgcataatgatataaagactgaagtgtatcattggttaaaatatttactattaataaaataatagaagctccagctctcttagcaagatcaatttgaagcggatcaatgataaaatccttacataatactggtaaatgtgtgagttgtgttaacgtttgtagacgttcaaaacttcctccaaaatatttttcatcggttaaaattgaaatagcatttgctccatgattttcatatttagcaatttgatgctctaagttaatgtccttgaatgcttttacagaaggacttttagattttatttctgcaataatactcaatgttgattctcttttcaaagtggtttctagagctgacttataagatacatcaacttttttaatatgttttattttatcagtataatacccatcacttagtaattgttttttatactgtacaatctcatctaatattgtcacttttattcccctttcatcaactgatattgttttaaggctttgccactatcaattaaatcttttgctaaatcaacgccctttttaatactatccactctatttgatatatataaggctaatgctgcattcagcactacgacatttcttttaggggaatgatcttttccacttaatatatcaatggtaatgtttttattttcttcaggtgtaccaccttgaagttctatattattcgcattagcaatgccgtaatctcgtgcatttaaaacataatgtgaaatagttccatcttcatgcaattcatatatttcgttatccccagataacgttgcttcatccattctattcgcgccatgaagtacgatacctcttcgtcgtcctaaatctttcatagttttaataatcatggataattgggaagcatcgtatacccccattacttgataatctaatttaaaaggattgattaatggtccgacaatattgaaaatagttggttcatgaatgagttttctaataggttgaatatatttcataattggataagattccatagcactgataaatgctaaatgcgttttagatacttgtttggctacattcgctactttcgtagtaggaatgtgtaattgttgtaataaatcggtacttccagaattagatgtaatgcttttatttccatgtttaatgactggaacatctgcacttgctactacaaatgatactgtcgttgaaatattgaaactatttgatttatctcctcctgttccacaaacacatatacttcctttgtattcaggttgagttgaatacatcgtatgaataagacttttcactatataagttaattctttttgttgtatcgacttatttgtgaaagcttgtaataactttactttatcttgagtatgacattctggattgatgagatattgaataaattcagtagtttcatgttgtgagagtgttacatggctttgaatttggttgagtaatgttaaggtcatcatatttacctctttcctttacgatatcgataaaatttttaattatttgttgtccttggtctgttgcaaacgactcgggatgatattgaataccaaaatgtaatccattttttgtttcataagattgaatgcaatcttttgttcttccagtaattattaattgtgatggaaaagagatttcatcacttattaatgaatggtaacgcattatattaaattgatttgctaagttgttatataatttagtttgttgaataactgttaatatatcgactttaccatgcatgactttttcaccttgaataacatggccaccgtaatagcatgttattgcttgtgcacctaaacatacgcccaatatcggtaaagatttatacctttcaataatatttaatagatggttactatctaaaggatgaccaggtcctggagatatgatgagaccatcactttggttaacgtaattaagcacatctttatcatctggatatttaacaatgatgtcgtctaattgacttactatatcaactaagttatatgtaaatgagtcataattatcaatgattaaaatcatggtgttacctccaataaactttttgcttttaataatgtttcttctaattctttttctggtactgaatcataaaccaccccacatcctgcttcgactttcacggtagtatcatcgattaacattgttcttattgctaaggcaaaatctaaattctgattgcaattaatgtagcctacaccaccactatataggccacgtttatatggatatgtctcatatatacgcctaattgctctaagttttggagctcctgaaacagttcctgtaggtaataaattagcaattactgtcataggagataattctcgcttaatctcacctcttacttcgcttacaatatgcatgacatgttcatatttttcaattttcattaattttgtaatttttgaactaccggttctactgactctatgtatatcatttctgcctagatcaacaagcattcgatgttcgcttaattccttttcatcactcaataattgctctgcattttgcttatcttcttttatggttttacctcttttaattgttccagcgattggattcgtaatgaccgtcccatcttgtacagctacaaaactctctggagaactgcctataataatttgtgtagtcatattaatatagtacatatatggacttggattacgtctttttaagttttggtataattgataacttaattgtaatgtattatttttaaaataatgattgtagctatatattctagatggtacaacttgaaacatatcgccttcttttataagttctttcaattgttttatagtatttataaattcatcatctgatacatttggcatgatatttgaaggcgtaggaggatgaatataatcatctgtataagctttaatttgagatagtgcctttactctattttttactctttcttctaaatctttctgttctacttctgagaattgatttgtagcaataacatataattcatctttataatgatcaaatacatatacatcttctatcatgtgaaattcaatatcattgctgtccttaatttcttgtatagattgctgttttaacattggaaattcatgtcttattaagtcaaaactacatgtaccaataaagccagatacaaatggtaaatgttttaatttttcatctgtaatctgaatattaaattgattgatataatcttttaagtattcataagacttttcagtaatttcaatattttgtttttttgtttttatcgttagtaagtcgttgtttaacacaacagaaccatagctttcgaatgctacaatagaatatctacctttaacttgtttttgactggtactttctaaaataattttatttttctttaactttcctaatacttcgggtgtaatattagctctaagtatttcataatatattttcattaagctttagtcctttctcaaaaaaatatcagcatccttatttaaaaggacgctgacgcgcggtaccaccttaattaactaaatattttgaattatcaaaatatttaaagttcactcatttttcatttaattttttataagtataaacccaattttattattagtgatgttagttttcatcaaccactaactttctatgattatctagctaataattactatatttataccaaaaagacaccacgattacgttccatagataaggacgcgttaccgtggtgccaccttaattaacattacatgttcactttactgttattaaatttaaccttctaagtccaattcaaacatatgctgtgctaatttacatcatccattagctttctatttgctacatcacatatcttctactcaattctcagaattattaaaatgttattataattcagtataatacataaataaatcttccttgtcaatatttatttcaatttattgatgacaagcaataggcatataataagttttgagcggcatgtatagaatcaatatgtgttcgttccagtgcatgagaggactcaataccagctccaaataacccatgtttaatatctgctcctgcttttaatgctgcagacgcatctgacgtataataaggataaatatctattttatacggaatatgattaaatttacataagtttactagatgtgtttttaattctttatgataaggtccagacgcatctttagcacaaatagatactgtatattcgtcagaagattgtccctctccaagcgctcccatatcaaaagcaataaattctacaattttattagaaatagatgcattcgctccatatcctatttcctcattattagaaatataaaattgaatagtatgtggtaatttaatttgttcattttttattctttctaataaatctaatatcattgctacacttgctttgtcgtctaaatgtcgggatttaataaatccagatgatgttatttctgttcttggatcaaagctaataaaattacctacttctattcctaaaccttctgtctcttgcttagaagtcgttttttcgtctatacggacttccatgtgttcaatatctcttgggattttttcattttcacgatatacatgaacacttgtttcatgtaaacatattgtccctgtgtatgtttcgccagagtctgtttcaatctgacaatattctccttcaatcgcattatatttaaatccaccaattagatcgattgttaaacgaccatcttctttaatttcttttaccattgcacctaaagtatctacatgagcagtaatacaacgttgacgctcattgtcttcaccctcaactgtgataattaaagcacctttatttgttaattgagttgaatatcctaaatgttctactttttgttttacataacttattgctttataagcatttcccgaaggactattaatgttagttaagttttgaattaattctaatatttttgattccattcaacttcctcctttaacaatttaaatatattttaacttagataaatagcgaactctaatgaatagtattgtttaaaatgaatgactcatttaaaatatagatattctgaatatttagaaataaggagggctcatatgaaaaatattttatttgttggtttaggattaatcggtggaagcttagctagtaatttaaaattttatcaacctgatcttataatttctgcctatgatactgatgtaactcaattagataaagcaatgtctattggtataattgataaaaagattaatgattatgcacttggtgttaaggaagcggatattattatctttgctaccccagttcaccaaacagcaatatatctaaattcattacctaattatgaaaccaaatcacatttgattgtaacggacacaggcagtacaaagcttatcattcaaaattttgaaaaacgtttattagaatcaaatattcatcttgttagcggacatccaatggctggtagccataaatctggtgtgcttaattctaaaaagcatttatttgaaaatgcatgctatattttagtttacgatgatgaacataatacacaagcagctaaaacattacaagacttgctctcccctacacaagctaaattcattgttactaatgcaaaagaacatgattacgtaacggggattgtcagtcatgttccacatattattgcctccagtttagtacacttgagttcaagccatgcaaaagatcatgctttagtcaaacagcttgctgctggtggatttagagatattacaagaattgcaagtagtaatgctgaaatgtggaaagatatcttacttagtaataaacaaaatatcattagtttactagaggatatgcaaactaatattaaggatatgatagttaaacttaaaaatgaagaagaacaacaaatatatcaattctttgacgaagcaaaaatatttagagaccaattacctcttaagcaacatggtgtagtgaatgttgggtatgatttatatattgatattccagataaaacgggtatgattaatgaagttacttctacacttagtttacataatatttctataagaaacttaaaaattttagaagttcgtgaggatattttaggtgctttacaagttacctttaaaactccaaaagatcgtgaattaggtattattgctttaaacgaatttgatacgtatattccataaaaatggaagtgggccaaaattcaaaatgagttttgacctacttccgttgttttacatcttatgacctgccatcaatcctaatctattatgttttgttccagatgcagtataagaaattgcttttgaaacaatgcctttgccatattttctttgtaacgtatcaatcgttttagctaaattttcatctctttgtcttttatattcatttacaaataaatttaattgtcgattttcttcatgaatgaactgtgttagtgaaacacttaacgtacgatacaaagcgtgtttatcacacaactgattcgcataatcattaacgactttaaatatatcttgttctagatttgtagcatcagttaaagtgtgttgtttatgtattcctccaccttcagtatatccaaatgaaaaatgtatagtacgtgctaattgctttctttctcttaatctacaagtaacatcttcaatcaactcttgcataacaatttttgcttctttaaattgatagtctctcatcaaaatttggcttttacatatagctggattattaattttacttttttctcttattttactttgatctataccgttagcatgtaaatgcatatcagtgcctaatataccaaagtctttcttcaaatatctatgaggataatgtgctaaatcacctattgtaataattccttttttatttaactttatttctgtttttttattaattccccaaaatgatttcaatggtgaaatacgccataatttatcgggtatgtcatgataccgccactcagtaataccttcttttatgtgtttagcttcgatatccatagctactttactaagtaacaagttagagccaatacctatcgtacagtatattcctgtcttatctaatactttcttttggaaacacttagcaaaagaatatactgtagtattaaaaagatgatagctatttgttacatccataaaaaattcatcaatactatactgatgtaaatcttcccttggaacatatttaagagcaattttagaaatttctaaagatatttctagatatcttctcatacttggattaataatataaatatcattatgctgtggaatttcaaataatctagatccagttttaattccaagttcttttaatttaggtgttgctgccaaaacaacagatccttgtcgcttagtgtcagctaccactgctaattttgtcgttaaaggatctaatcctttttcaatacaagacacactagcataaaaacttttctgatctacacataatatgtctctatcttcaagtaaattataatcatacatatcaagcccctccttagataattcgattatataagaacaaatgttctatatcaacattaaaaagaacaagtgttctattaaaaaatcttgaagttcattttttaaaaatgatatactaagcacatgattatgtaaggaggaaaatatcatgccaattgtaaatgtaaaattattagaaggacgctcagatgagcaattaaaaaacttagtcactgaggttacaaatgcagtggagaaaacaacaggagcaaatagagaagcaatccatgtagttattgatgaaatgaagaaaaaccactacggtgtagctggcataagaaaatcagagcaatagtattataacgatttaagtttacataataatattattgtagttaaaaagataagaaataagcaggccactttggcctacttatttcttatcgtctaaaaatgactctattgcttttttatttttctctttatcaatatctaatgcactaccatcgttattagtattgatattttgataagaattttttaacggtacagttagtgcttccacatttttatcgcctcgtattccaaaacttagtcctgtttggaaaatagctgagtttggcatatctgtgttaatatatcctcttaatataccggctactttaggtaatttcacgattgtacttggggtaatcaattctttcttaagtgtttgcataacttgttgttgtcgtctcacacgtccaaagtctccctctggatcatgtctaaatctagcataacctaataattctttaccgtttaatcgatggtgtcctttttttaatgaaactccaatattttctgacatatctttttcaacatcaattggcacaccattaggttctaactcatcaatcattttttcaaagccagtgaaatctatgactgcatagtattcagggttaatacctaaatttttatttagtgtttgtctcaacaactctggtccaccaagtgagtatgcagcgttaattttatatttatcataaccaggaatttccgcataaatatcacgcataattgacatcattttcatttttttcttaatatagtcatactgtacaaccataatagagtcagttcttgatttcccaccattagcttggtcagcaccgagcattaatactgtaattttcccgtcatttttaacggctccattaaatttatgaattttaatatcttttgcatgttcttgtgcatatttcataccactttgatatccatgaacgacatacgtaatcattacaataagtaaaactacaataatcagtattacaaaaggtaattttcgaaattttttcttcttgcgtcgtttagaaggtatcgttgtccccgtttgccgtcttaatattgtattatccttctcttctgtcatatttacctaccttacactctttaaaatcttcaaaataatattcggatatactataatatataaataagttatataaaataccttaaaaaatcaagtgttttcaataaatattacaaaggtgttaggaaaggatggcataaatgaatattaatacagcatactttgcaggaggctgtttctggtgtatgacaaaaccgtttgatcaatttgaaggtattgaatcagtaacatcaggttttatggggggatcagttaaaaatccaacctatgaacaagtaaaaagcggaactactggacactatgaaactgttaaaatagagtatgatgttgctttattttcttatcataaattattagaaatatttttttcagtcattgatccattagatgctggcggtcaatttcaagatagagggtcacagtatcaaacagctattttttatacaaatgatgatcaaagaaaagttgcgattaattatatcaaagatttagaacaaacgatgcattctgataaagccattgctactaaggttcttcccgcttcaaatttttataaagcagaagaatatcatcaaaatttctataaaaaaaatcctgaacgttacgcacaagaacagcgagatcgcgcaaattatgatcctcgttctaactcataaataaaaaagatatccgaaaacaatttcggatatcttttttatttatgtctaatcactcgcattacttttaacatactgtaccatagagaactatcttttctatataccaaaaatcgcggttcccactgaggactatatttttctttatatcttcgtaatccctgaaaacgatataaaccattaaaatgttcaaacacacgtcccgcaatacgttctcgtaaataagaataatcgagttgacctacatttgataaggtagccatacccatgttaaaagctttataccctttttctttaccccataataacatatgtagatataatccatccattagaggtaaatctaattcaggtaaccaacgaattaaatctactgaaattgcttcgttatagtatgttggcattaatgtacaaaaagcaataatcttaccttcttcatttttcataattccaattggcgctttatctaagtactgttctgtaaattgaccaacagaaaaatgcatttcagtacgtccatcgagccacttatcacttacttttctaagctcttctataaacgctttagaaaatggtggttctataatttcaaatttaatatttaaatcattaaatttattcagtgttgctctaaaaccacgtcgtttttttccagaagtagtaaattgtgttaaatcaataatagcctcttcgcctaatttaaaaaattgatttccaaaattatgatacaacggcataaaacgatcagatacttgatagaaaatgacatcataacctaacttttcagcataactatagaaatcatccaacaatgattggaatgatgctgtatttccaattggatctcccaatacgaccagcgcatttgatttatatctatacataagaaaggcttgttcactgtcatgcataaatacatctttatcaccactatatatcaaatgacttaaataattccctccatatgtttctataattgatttacattgagaaaattcttggaattgatgtgggcgttcaaagcgacgaccaaataaccatgcaataccaacaattaataatataacaactaccacagttaaccagaaatagtattttaataatgacgtatccatttccaagtgatataaatctaaagcatataaggtttcagaaataatgaaatgattaatatataaaacaatcacactaatgactaaggtaaatattaagttttttaatctaaatggacgtttaaatactttcgcacgtcgataagctaaaataagtaagataaaaataatgatgagccatgtaagtaacatgatagaagcatacgtatataacgttgcaagaaatattaaaacaagtgaaatcattgaataaataattgctctcttactttgcttatatattccccttacattaacaagtaatattaaacatgcacttgtatgaatagacaacatgatatagtaaataaaatgatctgcatcatataatccatcatacacaatcgtcacattattaataaagaaaataaaacttgttaatagtccgagaatagataaagcaaatgctgggatttttgaaataatatctttttgataagacagtatgaatgaggtaatatctttagcgggtacaaaatatttagactcttcaaagtacttacgcgcagaattgccaaattcaaacgtagatagaattaaagcaataataacaggtacaaaataataagcaaaacgatataacagtaaggcaatcaatattttttcttcaggaatatctaaggattttagtcctaataaaacaactaaatcaaatgctccaaatccacctggaataaaactaattagtccagataatgcagcaataataaaaataccaagtaatgttgtaaaagctacatgaatatcaataatccatgccgacaagtaaagtacaacagcagcggctatccattcaatacttgaaacaagcgtgcaatatattcctaccaatttattatgttcagtaaccggtttaacgactgtatacactataaaaataggtaaaaataaagcgactacgtacaatacccattttacaaaacgtactttatcaagaatatgagaagcatcgaaaatatgaagtacgactaaaatagataagaagcttaaaccagttaacattgaaactaatatgattgaaatagcgtgaagtaatctttttctatcagaagtataatttttataaataaatgttctaaatcctgcgcctataaatccaccaaatccaacaatagcattaaatgcattaataatataactcaaacgaaatactttgttcagtggtatactcaactttaaagttttaacaagaatgacatcatataaacttaaaagtagcattgatgcgccaccacatataaataaaccaattaaaaaccatcgattgattttactaaatgcttctaatgtttgtttgaagttaatatgtgacaattcatgatataaagtagcaactactacaataaaaagtgtgacagcaaataccacttttaatatagatatcaatctatttttatgttcttcagtcattattcattattatcctttacattatattaatataaaatatatcatatcatattctaggtatatatctttagactattgaactaacataattgtaagataaaaggtagtggaggagaattcatcgctctactttacaacgatgactatcactatattaaaaagcccgagacaactcattatgtctcaggctttttaatatagtgatttattctgcttctgtgtaatttttatgttcttcttttttaatctcatattgacctgcatcgtcaccatagtatttattgtaacgacgtttaaataataagaagatatgagaaactaatacttttaaaatagcgtagccaggaatacctaaaataactcctacaatacctaacaaattacccgcacttaataaaataaagataattgttagcggatgaatttttaacgtttttcccataatattaggagaaataaaatgaccttcaataaattgaaccaacgtccacacaataatcaattttaataacataaatggtgaagtaataatcgcaataataattgccggagaaattgcaattgttggtcctaagtatgggactacgctcgttactgcagcaattgaagctagaactaatccataatctaaaccaataatagaataaccaataaacaataaaataccaatacaaaatgatacgataatttggccttgaatatatgagccgacctgtacactcattttttctaataaatcatgatagtcttttctaaatttaggcggcacaattttagttgtataatctctaaatttagttccatctttcaacataaagaataatacaaatggagtagttgcaatcacaacaccaacattcacaacagcttctgcaaatgttctaattttagttccaaatccactaaaataatctgacgttaacgatggaatctttttagaagtagaatcaagccagtcctgaatttgattataaaatgaagataaaatagacatatgtgtcactttatcaatagctctattaaatttttcaatatattttgggaagttatttgcaagttgtttaatttgatcaccaatcacaggaattaataaatcgataattaatgttgcgcctccaataatcactagaaagactattgtaattgctaataatcttggaatattataccgttccatcaaattaatcactggatttaacaaataatacaaaataagcgataaaataattggcgctgcaatagtattaaagataatgacaaaaggctgaaaaacataagaaattttgtcaaagatgaatatagtaataccaagtaatactaatgaaaatagcgcaaataataaatctttaccacctagaaacttcataaagcgtgtttcagaaaagcttagcttattagctttctttccttcaactttattgtggtccattgacatatcattttcaccgtaccttttaatctaaaataaaataatctatattatatcataccatgtagcttattcattttgtgtgttattttgagattgaaaatgataaatatgcaaagctaaataaacaatttctgaatcatctacatcaatatctagatttttttgaataactttagaaatcttatatgctgtactgtaacaattagggtaatatgttttgaccatattgataaattcatcttgtgcatgaacatattcctttttatttaaacgacgaattagaaattgaatatgtctaataaatcgttgatattggaccgttcgaggatttacaggataccctatatcattttcgataattaatacacatttacttatcattttattaattaaagatatttcactcataggtaaatcttctttatttgacgcaatatgcaatgctataaaacctatttcatcctcaggaaatgtgacatctaatttttcatttaatctctgtataacttgtgtggcaatatcatacgcctcactatataaatgtttagtttccattgcaaagggattactaattatttgattttgttttaagcgtttatatgcaaaaataatatgatcggttaaggcaataactagttgtttatcatcgttcatatagattgtacttgtaatatagttaactgattcaataattgcttgtaagacctcttcatcagctatttcaactagagatttgtaatactcttgttgttgtttttgatctaatttatacactttctcaatagaagcattatcatttacgaccattccaggctttttattaaaaccaatacctttaccaattaaaataacttcttgattactattgatgcatatgatgacgttattatttaaaatttttgaaatatgatatttactcatcattatcatcctttttttactattaaaattatatagttaaacattatatttgaaaagtcgtccttttaaaaaacacttctttctcgcattactctaaaagatggagaaaagaagtgttgatttaaattattaatgttttttagatattttatcttcacgtccccaagattcaataccaaataaattaatctcaaggttttctggtttaaatacaggttttaaaccagcacgtttttgttgaatgtaatctttcataacagcaaatgcaatatttgaaagacctataatggaaacaaggtttacaatggccattaatcccataaataagtccgctgtactccatacggtttcagttttaacaactgctcctgtaaatactaatacaacaactaagcatctaaaaataaataaaattgctttgtttttagatagaaattctatattagattgtccgtaatagtaattaccaactacagaagaaaatgcaaatagagtaatcgcgacagttaagaaaataccgcccggagaaccaagatgttcattcaatgcagattgtgtaacttctacaccttgtggcgctttttcaccaaattttaagcctgagtaaagtaaaatcataatagctgttgctgtacaaacaagcattgtatcgaagaagacacctaaagattgaagtaatccctgttttactggatgtggtacagcagcagtagcagccgcattgggggctgaacccatacctgcttcgttagagaataagccacgttttacaccttgtaaaatcgctgtacctactgcgccacctgcgacttgttccattccgaatgcacttttaataattgtaccaatcattggaataatttgatcaaaattcattagtaagataactaaaacaataccaacataaacgatagccattattggaacaattaaagatgataacgttgcaatactacgtacaccgccgaagataatgattgctgtaatgacagccaaaataataccagtaatgactggactaatatgatattgggttcttaaagattcagcaatagtattcgattgaactgtgttaaatacaaatgcaaatgtaacagtaattaacacagcaaatgtaataccaagccatttttgatttaaacctttggttatgtaataagctggacctcctcggaagccaccatctttatcatgaactttgtaaacttgtgcaagtgttgcttctacaaatgcactcgcagctccgataaatgcgataatccacatccaaaaaactgccccagggccacctaacacaatcgctgttgctacaccagcaatatttcctgttccaacacgagaacctgcactaatagcaaatgcttgaaaaggtgaaatacctttctctccatttttcagagtttctggtttttcgactaatgccttaaacatttcaggtagcattcgtagctgaacaaatttagaactaatagtaaagaagatacctactgtcaatagtaaacctattaaatactgtgaccagattaaatcatttccaacttggacgacggatttaaaccaatcaggtattaaactatcaaaatctctcaattaaatccctctcatcaaaattattgttatgatatacattacaagagatttatattgtagtattaaagatcaaaatgtacatatttctcatgtaatcactttgatatacttaccaacaatataaatctcttgtgagttataaataattaaatattaaattaattttatcatcttatgaattacttgaaaacaaaaattttaaaatcatattaatttattatcattgattttacatttccaaattcatttgtatcaaccacaaatgaaccatttgtatattgttcagaaagatgaatacgagaaatttcacctgtttcagcatgtttatctgaataaagtgtatagtatgtttcatctctgacaacatgtgcagctacaatacgatgaggattttttttcaattcttttaaaagtgtaatacctctttgtgcgcgtttggcatcttgtaagatatctttagcaatacgttttattgctcctctttgcgtagccataatgattgaattattcttatcaacagtatcagtcataataacgtaatcttcatcttttaaattgatagatttcacaccagccgctcttaatcctgtatctgaaagttcttctgtagaatacgttaatgacatgcctttatgtgtaataacagtaatcatttgttcttgagttatgcgaagtacatttaccacttcatcttcattttttaactttgttgcaatgagtggcttattaaatcgcgtggttttaaataatgattgattactttttttaatcatgccattacgagttgcaataatataaaaagctttaccatcaaatgttttttcgttaaatacatctataattctctcgttttcttctaaagacacaatttgcgatacatgctgacctaactctttccatcgcacatctgcaattttatgaattggaataaagagatatcttcctttattcgtaaatactaaagctgtatcttgagtatttacagtttggtatttgagtaaactatctccctcttttaaacctacttctgtcacaccacttgcattaaagctacgtgtagacgtacgttttatatatccatgtctagtcatacttaaaacaacttcttcacttggtacaataacttctttatcaattttaatttctgatatttccgcttcaattgaagataaacgtgatgttttaaaacgttttcgaatctctgtaagctcttttttaataacatttaataatgcgtcatgattatcaagaatatttcggtactcttctattaatgtttgtaattcttcatgttcttcttcaagtgcaacaatatcagtattagttaaacgatataattgaagcattacaatggcttctgcttgtgcttcagtaaagtcaaattcttttactaaattatcttttgcatcttttttatttttagaatgacgaattagcgcgatcacttcatctaatatagataaagctttcataagaccttctacaatatgcatacgcttttcagcatgatttaagtcatatgtggtacgattagctacaacttcaatttgatggtttaaatagctgtcaataatttcacgtagacccattaattttggacgtccatcactaatagcgaccatattgaaattataagtaatttgtaaatcagagtttttatataaatagtttttaatagactctgaattaacatctttttttaattcaatagcaattcttaaacctgtacgatctgtttcatcacgtacttcaataataccatctacttttttatcagcacgaagctcatcaatacgtttcacaagtgaatttttattcacttcataaggaatttctgtcacaattaattgtttacgtccatttcttaacgcttcttcctctacttttgaacgaacaacaatttttccttttcctgtttcataggctttctttataccatcaatgccttgaataataccgcccgttggaaaatcaggacctttaatatatttcattaattgatttactgaaatattaggatgatcaatatattttaatgttgcttgaattacttcatctaaattatgtggaggaatatcagtagcatatcctgccgaaataccagtcgaaccgtttactagtaaatttggaaatcttgctggtaacaccataggttcaagtgttgtgtcatcatagtttggtacaaaggacactgtttctttattaatgtcacgaaccaactcttcagaaagttgacttaatttcgcttctgtataacgcatcgcagcaggtggatcattatcaatactaccattatttccatgcatttcgattaatacatgacgcaacttccaatcttggcttaaacgtaccattgcatcataaactgaagaatcaccatgtggatgatattgaccaataacatccccaactgttttcgcacttttacggaaatttttatcatacgtattgccactgctatacatagcaaataaaattctacgttgtacaggttttaaaccatcacgcacatctggtaacgcacgttcttgaataatatatttactatatcttccaaagcgatcgccaataacatcttcaagtgataggtcttgaattatctcactcaattgacttcctcctcatcatcttcttcagtatctagtatttgaacttttgtattatctaaaatactttgatcttcttgcatgccaaattcaacatgattttcaatccattcacgtcttggtgcaactttatctcccattaatgttgttacacgtttagaagaacgtacttcatcatcgatttgaactctaatcaacgttcttgtctcaggattcattgtagtttcccacaattgttcaggattcatttcacctaaacctttatagcgttgtaaaataaaacctttacctaattgtttttgaagtttttccaattcatcatctgtccaagcatattctacttttttagatttccctttacctttttctaatttatataacggaggtaatgcaataaaaacacgacctgcttgaacaagaggtctcatatatttgaagaaaaatgttaataataacacttgaatatgggcgccatctgtatcagcgtcagtcataataataactctattataattactatcttctaatttaaaatcattaccaacaccagcaccaatggtatgaataattgtattgatttcttcatttttgaaaatatcttcaagttttgctttttcagtattaatcactttacctcgtaaaggtaaaatagcctggaattttctgtctctcccaagtttagctgatccccctgctgaatcaccttcgacaagatataattcatttttctcagtattcttactttgagcaggcgttaactttcctgataataatgtatctttacgtttgtttttcttaccagaacgtgcatcttcccgtgccttacgagccgcttctcttgcctgttgcgctttaatagctttcttcacaagtgatttagataattgccctttttcctctaagtaataaggtaatttttcagaaacaacagaatctactgcactacgcgcttcagatgtaccaagcttagatttagtttgtccctcaaattgcagtaattcttctggaatacgtacagaaatcactgctgttaatccttctctaatatcattaccatctaagtttttatctttatctttaagttcattgatacgacgtgcatagtcattaaatacgcgtgtcattgctgttttaaatcctacttcatgagttccgccatcttttgtacgtacattattaacaaaacttaatatactttcagaatattgatcattatattgaaaagcaacatctacttcgattccatttgcagcacctgtaaacgtcgtaacatcatgtaatacttctttaccttcattgatataacttacaaattctttaataccttcttcgtaatgataaacatcttcacgttcttttccatcacgtagatctttcaaagtaatttttaagttttttaataagaatgcagattcttgtaagcgctcacttaatgtatcaaaattaaatgacgttgttgctttaaaaatacttgagtctggtttaaatgtaacttttgtacctgttttcttagtttttcccgctttcattaaaccaggagttggaataccaccgtctttaaaagattgcttataaatttgtccatctcgatgaatttcaacttctagccattcacttaaagcattaactacggaagcaccaacaccatgaagtcctccagaagttttatatcccccttgtccaaatttacctccagcatgtaatacagtaaaaataacttctacagtaggtttaccagacgcatgcataccagttggcatacctcttccattatcttccactgaaatactattatcttcattgattgttacatcaatttcattaccataaccatttaaaacttcatcgacggagttatcgacaatttcatatactaaatggtgtaatccacgtttatcagtcgacccaatatacattcctggacgttttctaactgcttcaagtccttctaatacttgaatcgaatcatctgaataatgatttgtcatttttgttgccaatgcgttcgcctcctacaaacgtacgttcgtttttttaactttacaatagttattcttatataaaacgcattaaaatgcaagtatgagttatataagatacgtatttaacttaatatataagacgttttttcaatttttaatcgttgtcaggaatactttgtgataaaatatacctacattatataagggatgtgtaaacaaatgatgatgatagttctcatgttgattttaagctatctcattggagctattccaaatggttatgttataggaaaagttttttttaaaaaagatattagagaatttggaagcggtaataccggtgccacaaatagttttagagttttaggaaaactagctggatttatcgttacttttttagatatatttaaaggattcattactgtatttttcccattatggctcccagtgcatgcgcatggaccaattagtacattcttcacacatggattaattgtcggtatttttgcaataattggtcatgtttaccctatttatcttaaatttaaagggggtaaagctgtagccacaagtgccggagttgtgttaggagttaatccaatcttacttttaatcttagcagtcatattctttggaattttatatttaacaaagtatgtgtcattatctagtattattgcggcaatcagctgtgtgataggttcattagttattcatgattacatattatttggaatgagtgcttttgtatcaatcattttaatttttagacaccgttctaatattgttagaatttttaaaggtgaagagccaaaaatcaaatggatgtaaaatggatgtttcttgcaccaaatgtgaagattcggatttagttctattaattaaatatgataagcagttcatgtttaatagtgagaacaatatgttttagttcaagcaattattacattataaatataataataattaatataaaggatgggtcatataatgaaaatcaaattgactgatgaagcagttgaatggtttaaaaatgaattagatttacctgaagagaataaagtcttacaattttatgtgaggtatggtggagaatttcaacttaaacaaggttttagcccagcatttcgtgtggaaccgagcaatgacgttgagataggttatcatgaaaactataatgatttaattattgtagtttcagaagatgacttatggtattttgaagatcatgaagttctagttgaaaaagtagaccatgaagacgaaattgtttattctacaactaattaaaaaaagaccataagtatctaatatttacagatatttatggtcttatatttatatattcaaatcgctgcgttgtgtgatttctaattccttaccttcgttattcaatgcttcgactttactatatacctgatgccattctggaaaataacgatctaaacgaattggtctgaaatcacttgctttaatacataatagctgcgtggaccctgtagtagctaattcacctttttcattatatacttcataacagtacgttgaacgcaatcttgaataatgttctacccatgttttcactttaactttttcaggataaaaaatggatttcttatattgaacttgtaaatccacgacgggtgagataattccttctttttccatatctgcataactaaaacctaatttacgaatataatcagtacgagcaacttcaaaccatgtagcataattcccatgataaattactcccattttatctgtctcttggtatctcgcttcaatttcagtcatactataaatcatatttatgtacctctttccaattaagttcactttcaatattaacataaaaaagttacttgctatagaattccccatttactacttctactattgaaatagctcaatgacacaaatgaagaaaaaatccttagatgagattgccatctaaggattcaaaatacattcaaattttaaatattttttcgaataattgtattattgagcaagtttatttcttaataccatttgtagaatgccatcgtgacgataatagtcgatttcaacttgtgaatcgaaacgaacaatgacatcaaaatcaaccacttctccactttctttttttgcatgaactttaataatatcatgtggttgtacatcttcgttaatatctacagaaatctcttctctaccatttagaccaagtgaatcagctgattctccatctttaaattgtaatggtaatacacccatcataactaagttagaacggtgaatacgttcataactttgtgctattacagttttaacgcctaataaattagtacctttagcagcccagtcacgtgaagatcccataccataatcgttgcctgctaatactgctaagccagtgccatcttctttatatttcattgcagcatcataaattggcataatttcatcagttggccaatatgttgtaaagccaccttctgtacctggtgctaattggtttttaattctaatattcgcaaatgtaccacgcaccataacttcatggttaccacgacgagaaccatatgagttaaaatcacgaataggtacgtcatgatttaataagtatttacctgctggtgtatctttaccaatagcacctgctggagaaatgtggtcagttgtaactgagtcaccaaatttacccattacacgtaaatcttttaatggttcaatggtacctggtttttttgataaaccttggaagaatgttggattttgaatatatgttgaattaggatcgaagtcatataatggagagtcagtaacatcaatctcattccacatttcattattgttgtatacatttttatattcttctttaaataattcaggtgttacaacactatctactgtatcagcaacttctttaattgaaggccaaatatcatttaagtatacatcttgaccatctttagctttaccaagtggttcattttgtaaatcaatatcaactgtaccagctaaagcatacgcaacgactaattgaggtgaagcaagatagttcgcttttactaatggatgaattcgaccttcaaagttacggttaccagataatacagaagtaactaataaatcttctttagcaatagctttttcaatttctggcaatagcggtccagagttaccaatacaagttgtacatccataacctactagattaaatcctaaatcatcaagatatttttgtaatcccgaatcacgtaagtaacctgtcactacttttgaacctggtgctagtgatgttttaacatattcaggcacttttaatcctttttcaactgcttttttcgcaactaaaccagcacctaacataacgtaaggatttgatgtgtttgtacatgaagtaatcgctgcaattgcaatgtctcctgttttcatagttgtttcagagccatcgttaaattgaatatgggctgatttatcaaattcgctttgatccaaaccatgaccttgatttccagcaggagctgttacagatttttcgaattcttttttcatatcacttaagaaaattaaatcttgaggacgtttaggaccagatagtgaagcttcaactgtcgataaatctaaattaattacatctgtatattgtggatcttccttatctgatgtaaagaacatattgttttgttgtaaataagctttaactaactcaacatgctcttcagagcgaccagttaatttcatatatttaagtgactcttcatcaactgggaagaaaccacatgttgcaccatattcaggcgccatgttagcaatagtcgctcgatcagctaatggtaaatcggcaacaccaggaccaaagaattctataaatttaccaactacaccttttttacgtagctcttgagttactcgtaatgctaagtcagtggcagttgatccttgaggtaatgaattagttaagcgtactccaatcacttcaggaattgggaaatatgatggttgaccaagcatacctgcttcagcttcaataccaccaacaccccagcctaatacaccaataccatttatcatagtagtatgtgaatctgtaccaacaagtgtatctgggaaagcagtttgttcaccgtccacgtctcttacatgaactaccttagctaaatattctaagttaacttggtgtacgatacctgttgcaggcggtacagcattataattattaaatgcttttgtagcccagtttaaaaattgataacgttcatagtttctttcaaattctaatttcatattgcgttctaacgcacgtgggtttgcatagctatctacttgtacagagtgatcgatgactaaatcaaccggtacttctggattaattttattaatatctccacctacatcattcatagctttacgtaatgaagctaagtcgacaaccgcaggcacccctgtaaaatcttgtaagattacgcgagaaggtttgaaaggtacttctccttcattaccttctttaccaaaatgggctaatgctttaatatgatcatctgtaataacaaagtcatcttcttgtcttaatactgattctagtagaacacgaatagaataaggtaacttactaattttagttaaaccttgttcttcaagactttttaaatcataatatgtatatgatttacctcgaacttcaaatgatttttttgcttgttctttaatgttagaagccatttgattatcccccttgaatattaaaaattcataattatacttctttaattaaattgtataattatatgttttttaaaacaactatatatcactagaatttgagtgatttgaattttggttttataatcagttaatataagaaatacttatcatagtacatttaaactataagtattttttattaaatgagaatttttttcaataagctaaatgaaataaaaaggaaagtagaatagaaattcattttgaatttttggctccaatatcaacatatattggatgtggattttcttttgaaagtctttatatttcgatctaaccatattaaaaaacgcctaagacaaataagttgtcttaggcgttttttttaattattgttctgctttctctgcattacgtcgattttgacgtttttctaatatatcagattcatagtctttttgttgatattcaatatattcttttagtctatgtttattaggctgtaatgttaatcctaagaatttgcgttcttggttagcatctttatagaaactaatcatcattagtatgaccacaaaggagaatggtaatgcactaataattgcagcactttgtagtgcgcctaatgcttctgcgccatctccaccacctgctaagagtaagatgaaggcaataagagattgtgcaataccccatgttacttttaccacgttagatggttctaatgagccatatgttgtttgcatacctaatacaaatgttgctgaatcggctgatgtaataaagaatgaaccgattaatacaagtgcaacaagtgataaaaccattcctaaaggtaaatgattaaatacgccaaagagttgtgtttctgctgacatcttgaatagctcagaatgttttttacccatttcaatacctaatacgccaaatacactgaaccataagaaacttattagagctggaacaagtaatacacctgaaataaattcacgaattgaacgtcctttagacacacgcgcaataaatacacctacgaatgggctccagcttaaccaccagccccaataatatagtgtccaagaagacatccattctcttttttgagaatttaatgctgctgtatcaaaactgttgaataagaatgtattgaacaaactaccaattgaacttgtaaacatgttcaaaattaatacagtcggtccaacaattaaagcaacaatcattaatattgtacctaaaccaatattggcattacttaaatattgaattcctttacttagaccagaccaagcactaataataaataaaattgtaacaacaacaataataagtgattgaacccatacattatttgggacgccaaataagtaatttaaaccaccgttaatttgtaatgcacccatacctaatgatacagctacccctactactgtagcgaatactgaaagtacatcaataatcgtaccaataggtccttctactttatctccaagcaatgggcgtaatgttctagaaacaagtcctggttcatcttttctaaattgagcgtatgctaaggcaagagctacgacaccataaactgcccaagcatgaaatccccaatggaagaaagtagaacgaagtgattcagtaaaggcttctgtcgtttttggactagcagttggtggtgctgcgaagtgtgacataggttctgctgcaccatagaatactaaaccaatacccatacctgcactaaatagcatggcaaaccatgaaatcgtattaaactctggtttatcatcaggtttgccaagttttaatttcccaattggactgaaaatcaaaaagacacagaagaaaacaataatagttgtaagtattaaataataccaaccaagtttatcagtaatccatccacttattgaactagtaattgaatcgaattgttccggtacaattgccccaattaatacaataatcgctacgataatcgcactataaataaataccggcgaaaatttctttcctttcttacttgattcagaagaagaattcataactaatataactcccttcatcgtaatattaaattttttcaaaatgaaaaatacacaattaattataaaaataattaattaatttttcggtaaaccactttaatataataacaaacgttttaatcttaatcaaatttcattaattttaatatttactaatttatttatgttttgtatgatatattatataaaaattaaataaataggagattactatgctaaaagaatttaaagagtttgcatttaaaggaaatgttttagatttagcaattgctgtagttataggagcagcatttaataaaattgtatcatccttagtaacttatattatcatgccattgattggtaaactgttcggttcggtagattttgctaaagattggcaactttggggcattaagtatggtcttttcattcagtcaattattgattttattattgttgcttttgcattatttatctttgttaagattgccaatacaattatgagaaaagaagaaccagaagaagaaattgatacaaatacggtattacttacagaaattcgagatcttttaaaaacaaataaataaatccaaagagtccgggacataaagtttctagataagtgaaaaaagacaatttctattgaaataatatagaaattgtcttttttataatttttttgattattttcagctcgtcgagctgctacttttcttatattaagtgccattaatacaaattctagttctcttttgactttatttatccctcaaatggacattcgagtgaaacccaaaatagccttcataaatccaaaaataggcgccacgtcaatttttccttgactgtagatggtttttgtttttgcttctgaaagcttttgattaatttgggctttaaaatattcccaattataatttttcattatttttttatttgtttttgaattgaatttcatccattggtgcttcaaagaacattctgaacaatcatcacattcatataatttaaagtcccgtttaaaaccatatttatcatgacgataggcatatcttttaaaacctaatcgctttttgtttggacaaatgtattcatcgttaatttcgtcataatcccaattttgagtattaaagatgtcactttatactttttagttttatcttttatcaacataccgtaagttataagcgatgttcgattaaaatcatctataattgccatataattgggttcgctaccataacctgcgtcagctacgatatattcaggtaaatgaccgtaggtctcttgaattgaatttaaaaatggtatcatcgttcttgtatcagtaagattttgatacacatgataagataaaacgaattgagaatttgtcgctatttgtaaatgataacctggcttgagttgtccatttttcatataatctcctttcattctcataaatgtggcctcatgatctgttttagaataaatatttctatgctttaaaataaatttttagccttcgtatttatgctttcgctcagagtaattattaatttgctttttatattttttaattttagttcttttgagccgtatttgttttcttattttagtccatttttcattatcgatatgttggtttaaatcttcgatttctttatcgaaatgactaccaatcaaatctatttctttttttgttaagtcattatcgcgatcttctttaatctcagttatgattttatttgtcacccattcatgatagagcactttagaatcttcattcttccttgactcatggttttgaatactcttttttcatacaaatgtatatcgattggcattcgcctcaactttcgtaccatcaataaaaatgacctgttcatctataagatgttgtttcaaacactgactatgaaattgaataaataatgattctaataaagcatctacttttggattgactctaaatcgattaatcattttataagaaggattttgattttgtgatagccacatcattcggatgctatcattaagtcatttttctatcttacgtcctgaaaacacagattgtgtgtaggcatatagaatgacttttaacatcatttttggatggtatgatgttgcaccacgatgatgtctgaatttatcaaattcagtcttaggaatggtttctacaatatcattgacatgtcgtgaaatatcatttgtggggataagaattgaagtttccattggtagagtaagttgagtcatgttataatctttatacataaggcacctcgttaatttagtttattagtgtttattaaattatacgaaagggtcttatttttttgaagtatttcaatgtaaaattacatataaatacagagtgttttggcgagactcttgagggaacaggacaagctgaagactacaggctgaagctgtcccctaagaaagcgagccaacaatacgtagtattgtaaataaagaagccagtaaatgaatttataaaaaactcatttactggctattttttaggaattatgtcccagcctcttttgttatttccatttaaattttgtgtaactttgatactgatttgtatttacttcaagtattaatggaattcgttgttttaattcactcacatgagagataattcctaccatccgtccagatgtttttaaatttaataatgtatcaagagatgtttctaaagtttcttgatcaagtgtgccgaatccttcatcgataaacattgattctaacgtaatacctccagattcttgttgtacgacttcacttaatcctaatgctagagccagggatgcttgaaacgtttctccccctgataatgaactaatatgtcttgacttattagaatataaatcaaatacatcgatttctaatccactatatccttgtgatattgattctcttcgtttaagttggtatcttcgcccgctcattatatctaatctaatatttgcttgatgtataattctttctaaataataaattaatacatagttttcaagcgataatttttgatgattctttccagataaaacctcagataaattaaaaatttgttgctgctcttttaactcttcatctaaatagtgaatatgtttttctatttttgcaaatttttcatcattcttcttaattttatattgtattgatacaacatcattaacatactgattatatttttcttcgatatgttctttttgcatttcaagattagatatatcttcaagttctttttcacttgtaaggcgtgttaatcgttctatttcaacgttatatttatgttgttccttatcgaattgattaactcttttctcaatatgttctttattttgaagttcctgctttaatttttttatttcatcttcattttctaaacctaatcgtttcatttcttttcggatagttgttgcaaaataatctaattctttttgtagttctttactcgtagctaaataattatcaacactattattttctaaagctagcgcattttgatatgattgcatgtttttattagtatcattaacatgttgatgatattcatcaatctcttttcgaagacttaagtaataatttttaaaagtttcaatacttgaatatcctgtatttatttcaaaatcttgaattaaagtttgattctgacgtttttgagaagctaatttctctaatttaagttcttgctgatgcttctcttgctgtaacgtatgaaatttttgttgtaatttatctaactcttctaattgttgttgtaattgtattttttcagactttgcactttgtaacttttctttgatttggtctaaattaatcgatttatactctatctctcctaaatctgatatgctttgagagagtaattcacacgtcgcttcgcttttacttaaatgctgttttttttcattaatttcattagaaagtttatcaagtaattgatgattttgattaatagtttcgaaatcaatatgctgatttaaagattcaatttcatttccacatattggacatgtatcgccaatacgtaacgctgactgtatttcaataataaaggtttgtttatcatttaaatcaatattacgtttatcaatgattcctaactgttgattgagtgtatcaatgtcattttttaaattttgtacctcttttgaatgttgatgatattgtcgttttagggaaacttgcttttcatacttatcttttaaattctgttgttcatctaattgtttttgtaattgatatatttgttcagtcagctcatcaatagctttattatccactttatagctatcaatagatttactcattttatgttctttattaattaactgctcttgctctttcatcatttcattataactgtgaataatatgttcttgctctttaaacgcttgttgatatttattcaaataattataaaagggctttgattgttctaaactctcactttttaaatgatatgagtcactcatcttgtctaattgtttacgttctttttcaagcatgtttattttattatttaattgcgatattttattttcagtttctattattttggtttttattgtttgacgtttttcttctttaaagtgttgttgatcatataaattaaacagcatgccagcatcatttaatcgatttaattttacttttaatgcatttatgtcatccatttgttcatctaactgatgttttaattgatgatattctttcagttcactcagttgttgttctaacgttttatttaaatcaatacgttttgttatagaaagcaattgttcgttttgctcattttttagatgcagtcttttttcttcgatttgatgacctattgctctaaaatcgggaatagtctgtattaattcttgagttttcatgtgatgaatttgtttaaattgaattaattgctcatcatcaaatgcttcgatatcttcccatagtaattttatttgattgtatcttttttcaatttgttttttctcttctttcacttcactttgaagaagtttttgaatttcttcaaaacgtatactattaaataaagttcttaatatcccttgtttatctgtactattggatactaaaaattttttgaattcaccttgtggaagaataaataactgtctaaattgttcagcattaactcctagtaatgatttaatatattgatttccaacgctgattttactttctcttaattcatatgtttcacttttagaatcatattcatacacatctagttttcctggtgtttgactagtgtttccttctttagtaaaagcgccttgacgaataattttgaaatattttttattgagttgaaattcatattcaacccacataggagattttgcctctgcaaaatgacttcttaatcccgcttcacttctgccttctgtagaagcttttccaaataacgaaaatacaattgcatcaaatatcatggtttttcccgaaccagttttaccactaattaaaaaaagttgatcatttttaatttgagtaaaatcaatcatttcatgtaagaatgggccaaaattatgtaacgttaattttattggtttcattttagacctccttattcgataccaaagtgattaaattatttattttttcttcctggtattttgtcatctcattatctgtaatcatcttataaaattgcttaataatagtttggtcgtcttgttgttgtatttgtgtctgatgtaaaggtccctcattttcaaaagtaatattgctaagcgcaagagtattagggaatagttgttttaaatgaatcattggatcactaatatacgacatatttttaagtttgaaatgtatataattatctttatttttaggttgaatatgtccttgaatcacttcatcatactcgccctcaaccacttcaagctctcttaaaggtttaagttgcacaaatgatgttgatatttcatttttatctttaatcaccaaacgtttatatcccttaggctggtttatttctgaaaatgaatattgtaacagtgaaccagaataatcaataatgtcatctttaatactaaatggatgatgtaaatgtcctaataacactttatcaaatacgttaaaacacgatttagtaacactttcaacagtcccaattgttaaaggtctttctgaatctgatgtttttcccccatttatcgttaagtgaccaattaaaatatttattttctctttattcaaattttctactatataattaatacatttttctgttgcttgttgatacgtttgaatagaagcatctttaaaaaattcttttacttcactaatagtagcaaatggaagtacatagaaatgtacatcattaaatacgataggctgattcatatgttttaattttgtacgtataaagagtttggaatgttcaaaccatgaagcaccataattcaatcgttctttaccgtcgtgattaccattagaaataatcatggggatattcatatctatattaatcgtatgaatagcattttcaaaaagataaatggtttctttactcggataagttgtatcataaatatccccagaaatcacaactacatcaggtttttcatcttttaaacattgaataaattgttctaaaataaatgattggtcttcaagaaattgttttccgttaagtatctttcctaaatgccaatctccagtatgtataattttcataacattccccttactttttaaagaattataatttaattttaaaaaagagcgagattgaattctcaatgaactcacatactcgctctaaacttcaattcaatttaatatcaaaaaataatattttatttaattttagataagctaatattattaatctctattatgagactaaagattttttaacgtttttatatttatataacatagctaaacgccaaggaacaatcatactaaatgccaataaaaagaacatgcctccgatttctcctggatcaatagagctactaataaatatttttatgattgttctaataattaaaagcgaaattaaaatgattggaaacgcttttgatcgtttcatatatacctcagcaccttgaacttcaaaatgacttgtccagataagtacagacgaaaatatcacacctaaaatgatagattctaaaatttcagccccagttaatctaaaatatggaatgacatacatcaaagcacctgtcgacataaagataggaggtaaaataattttcttttcatttacagggaatttttgtgctttcatacgaataactatgacaacaatccccataaacaatgcaaatactatggaaaaaactaaatatgccaaatttacaccttcttatattcacataactaaaagtttaatactattataattcttaaatactccaactaaaaatgttttacaacaaaaacaaaggattgtaaacccttatggcatacaatcctttaataactattatttttttgaactcttcatgttttgatccatgtttttgttcatcatcgtcatcatttgattgattttcttttgagacggtttttgtcccatttgcatcatcatcatacgtaacatttcttcattgataggtgggttttttttcaaatagtccatcatatattttcttgctaagaagaaaccaccaactagtccgatgataagtgctacaatgattaataaaattgctaaccaagttgccattgtttcacccactttctatatcctactgaattttactaaataactatcttgatttcaagagttagttttagaataacaccacttcgcttttatattaacaaactgtttaacacgaatactaatattataaatcacttcatataaagtactattcacaaaataagaaagagcaggaaagaactcattttgaattcatttcccgctctctatgttgactaaatcataatattaaaaagtgcgaatttgatttaaaatattttctttagtaaagccatatttttcaacaactaagtctcctggtgcacttgcaccaaaaccatcgattccaatgactttgccttcagtgcctacatatttatgccaaccgagtggtgaagccatttcaattgcaacacgtttagttaattcttttggaataactgattctttatactcgtctgattgttgctcaaaagcgaaccagtttggcatagaaactactcttacacctttaccttgtttatctaaatctttagctgcttcaatagctaagcttacttctgagccagttgctaacaatagatattctggtttagtttcagtttcaaatacaatatatgcaccttttcgtacgccttcttcaaccgtttcttcatctacatctaaataaggaaggttttgacgagttaaaactagagatgttggtgtttgtttagattctaatgcaacttcccatgctactcttgtttcattaccgtctgctggacgaatgacgttcatatttggaatagctcttaaacctgctaactgttcaataggttcgtgtgttggaccatcttcacctacagcaattgaatcatgtgtaaagataaatgttgcattcaatcccataattgcagataagcgtaatgctggttttaagtaatcgctaaatacgaagaaggtagcaccataaggatgtaaacctccatgtgctgccataccgtttactgcagcacccatagcaaactctcttacaccaaaccaaacatttttaccttctggagtattaggattgtaatctgtagcttctttaacatttgatttattagatcctgctaaatctgcagaaccaccaaagaatgaaggaacagatttactaattgcttgaatgatttctccagaatctgcacgagtagctgcattatggtcactactgaattttggtaattcatctttataattttcaggtaatttaccactgattgtcaatttaaattcttcagctaattctggatatttttctgtatatgtttctaatttttctttccactcatcttcatgctcatttgcacgttttaacattgttgtttggaagatttcatatacttcttctggaacattgaaacgtttttctggatctaatccatatgcttcaaatgtaagttttctttcatcagtaccaagtggcgctccgtgaacaccatttgtaccgctaacgtttggcgcgccgtaaccaataattgttttaacttcaattaacgtaggaccattttgctgtttagctttagtaatcgcattatcaatttcttctaaattgttgccatcttttactaaaatatggttccatccataactttcaaaacgttgttttacatcttctgagaaagatttgttaagttcaccatcaagtgaaatatcatttgaatcgtataatacaataagtttatctaattgattatgaccagcaaatgaagctgcttcatgagaaataccttccattaaatctccatctgaagccaacacgtaagtataatgatctacaacgttaatatcacctttattaaatttaccacctaaatgagcttcagctaaagccattcccacagacatagcaaatccttgccctaatggacctgttgtaacttcaacaccatctgtatgacgaaactcaggatgtccaggtgttttagaaccccattgtctgaactgctttaattcttctaattctaagcttccagagacatgtaataaactatatagtaaagcagaaccatgacctgcagataatataaatctatctctgttaaagtagtctttagattgtggattaaagtttaagtggcgagtccaaagcgtgtaggccattggtgcagctcccataggcaaaccaggatgaccagaatttgcttcttcaattgcatcaatacttaatgcacgtatagtatcaatagctaattggtctttttcattaaacatcttacatacttcccttctagaattaatcatcttttatatattataacttaaaaatatagtaaatgataagattataatgttaatgattaaaatgttattaactattgatcattcttttttctttcttgactttttttaagtttttcaggcgttacatcgttgccttctggatcaatgactttggtactttcaatttgttgtttaaatccctctctaaaagaatctaaatattgtttacgcaacttagattgctcttttgcttcagcttctgttaaaccttgctcttttttcttttttgctaattcattaattctatctatatttaaattattatttgacatgtcattacacttcctattcttttctttaatacatataaaatacttaattaatataacaaaaaagagacatagataaaaaatctaagcatcataaactctttctaaaataaatgaagtatttttatataatacttcatattcccatttcttagaagtaataactttttatctgtatctcttaaatatttatttaactaatgcgaacactttatagtctgtttgttctgtattgttgggtatatcgttcttataatcatcgtttaaaatcgcttttttagggatcgtatgatcggtaatttcgtacatgtgttccgtatgagcgttctgatataaattagtaaaaaacaccagaaaaacgatgcaagatactactagaacaattatatttttaatgatattactagtacgattactaagcatttattttcactcctagaacatttgtttgtataaatactttaacagaactagtgttcctagtcaatagaattacgaacaaacgtttgtttaaaaaatcaaaaaatgctatactatattaaaataaacttagggagtgcctatatatgagagagttaactaaaagacaaagtgagatttatgattatattaaacatgttgttcaaataaaaggttatccaccaagtgtaagagagattggtgaagctgttggtcttgcctcaagttcaactgtgcatggtcatttatctagattagaagaaaaaggatatattagaagagatcctactaaacctagagcaattgaaatcgtgagtgaccaaaataatgatatgactagagaagaaactatctatgttcctgttatcggtaaagttacagcaggagttccgattaccgcagttgaaaatatagaagaatactttccattaccagaacatttaacgtctacacacaatagtgatgtgtttattttaaatgttatcggtgaaagtatgattgaagcgggtattttagacggagataaagtaattgtaagaagccaaactattgctgaaaatggagatattatcgtagcaatgactgaagatgatgaagctactgtaaaacgctttttcaaagaaaaaaatcgatatcgtttacaaccagaaaatagtgctatgagtcccatatatttagataatgtaacagttatcggtaaagtcattggtctatatagagaattatagtttatctcttgttcgttacgttaaaatctcttatatatgtttaatatacaaaaaactagaagcgcatagacgcttctagttttattttttatttaaaatctcttttactttatcaagtatatcttttttcttatttttctttgtaggcataatatcaacttccttgcaaaatgaacatacccctatatattataaatcaaacattatccagcgtagttttctgtccaaaatggttgtcgatttttattaaaatctacacctacacctaatgtatttacgtgcgtatttaaaatattttctcggtgtcctagagaattcataagtccttcgtgagcataaatactactttgttgaccataagctaaattttcagcagcagcattaaattgaataccatcacgtttcattctatcgaaaggtgaatgaccatttaaatcagtatgatcaaaataattatttttaaccatatcttcactatgttttcttgcagtatgagatatttttttagagtaatccaatgtatttaatccgtgttgttttctttctgcattaactaaatcaaaattttgatattcaaagcttttttctagcgttgtagatggtgcaccatattgcttttgtaatcggttttccatcgattcactcacttgcaacaaccctgttaagttatttttattatgtttatcgtaaaatgcagtggtataaatgtgatctttataaaaaacatcatattcattattttttacaacacaacgataacgtccttttgtaattttatctactggtttaccgagacgttgttcaaccacttttttaggggtattatatttaattttagatttagaagttataatattttgattactaaataaagcattaactttattattaatgtaacttaccattaaaaaattttgataatcatcattgtaataagtgtaccattttgtaccatattcatttgatgtcactctttttggtcgccctatcttattttctacttccttttgagacatatttaattgaatattattaactgcaaattcttgtttttttggaactttaagcacattatttttaaaacttgtatcttcatttaataaaacttctactttatctcttacattattttgtaaattaataaaaaactggttttcttcaatgggtttaataatgataaataacaaaaatattgcagtaaataaaaggaactttttaataatattcacctactaaacatatattaatctctatcaccattaaaaattgagtttcttacaataacatagtcaacagtagttagtgattttaaatctttaccgccagcataggaaattgagctttgaagatcttgttgcatttcaactaaggtatcttttaatgaacctttatgttccacaaacattttcttcccttcaacattcttatgttcccctttttggaattcggaagcactaccaaaatattctttataacgtttaccatctaactcaactgtttcgccaggagattcttcatgcgctgcaaataatgaaccaatcataaccatagtagctccaaaacgaatagatttcgcaatatcaccatgtgttctaatacctccatcagcaataattggtttacgtgcagctttactacaaatgtttaatgcagctaattgccatcctcctgtaccgaatccagttttaattttagtaatacatactcgtcctggtcctataccaactttagtagcatctgcaccagcattttctaactctcttactccctcaggggttcctacattacccgcaataacaaatgattgaggaatatgttttttaatatgtttaatcatattaataaccgaattagcatgaccatgagcaatatcaattgtaatatattcaggtattaagtgctcagtttttaatttttctataaattcaaattcagtttcctttacacccactgaaatagaagcaaaaagtcctttattttgcatttttttaataaaaggtatgcgacctacttcattaaagcgatgcataatataaaaataatcattttctgcaaaccattctgctaaagattcattcattactgtttgcatattagctggaaccactggtaacttaaaagtttttggcccaaattgtacagtcgtatcacattcagatctactattaacaatacatttatttggaattaattgaatatcttcataatcaaaaattttcatactttaaatttcccctatacattttaaatttaaaagacactgtagacataaataaaatatctgactctttacaaaattatttataacgtaatctagagcgagaaatcacctttttctcgctcttattatttatatccttatatactttacaattttttaaatacaatgtaaacggactaaagtattagtttcaattaccaactagattttttcacaccaggaatttgacctttatgagcatgttctcgaaatgcaattctagacatttcaaattttctcattacacctctaggacgtcctgtaactttgcatcttcttgttaaacgagttggagatgaatctcttggtaatttctttaatgctttataatctcctttttctttcaactctttacgtaattcataatattgatttactaatttttctctttttaattctttagctattttagattttttagccatatattatctcctttttataaatcgtaataattacgttttatatattaacatacttttaaaaaattacaaagacatttattttaaaattaaaagactcatacatgttattcatcttaaacatgtatgagtctataatagtttatctttttgtcgtatttaaaagataaggaattatttagtttcacggtgtagcgtgtatttatttaatcttgggcaatattttttcatttcaatacgctcagggttattacgtttattttttgttgtaatataattacgatcgccacattcagtgcaagctaaagttacattaacgcgcatcaataacatcctttcttgttatatataattaggaattcttacgatttaaaattctatcatatccttcattttcacgcaataagtttcttttaatttagtcagtttccttctacataacaaaaactaatcgtttaaaaaatcagaaaatttaaaatttttaaaataaattgttcaaaagttattgaatacttgaaccaaaacgattaaaatgatttgtatattttaaattttaatttaggagatattatatggaagataacaatatgaaacgcggtcttaagtcaagacacatatctatgattgctatcggaggtgcaataggcactggactttttgttgctacaggtagtgtcgtttctcaagcaggacctggaggagctatcttagcttatttattgataggaatcatgctttactttttaatgtcatctattggagaacttgctacattttatcctgtatctggttcgtttagttcatatgctacccgtttcattgatccgtctatcggttttacaatgggctggttgtattacattctatggtcattagtatcaagcgttgatgtaatggtagcttctaatgttttattttattgggatgtatttaaaattttcagtcctctagtatggagtttaatttttataacgattatattcctattaaatatctttactgttaaagcatttggcgaaacagaattttggttatcactaattaaagtagtcacaattattgtatttattgttgtcggtatattaatgatttttggtattcttggtggacatacatatggattcgagaattataccaaaggtgaagcaccttttgtaggtggtttatctggtttcttagcagtattacttgtagcaggattttctgtgggtggtacggaagttgtagcggtcactgcaggtgaatctgataatcctgaaaaaactatgccaagggctgttaagcaagtattttggagaattttattattttatgttttatctattgtcgtcattgcagctattattccttatactgatcctttattattaaataaaaatcaatcagtatctcaaagtccgtttactatagttttcgatcgaatcggtatagcatttgcagcatcaattattaatgctgttattcttacatcgttactatctgcagcgaattctggaatgtatacaacaagtagaatgcttttctctttgagtgatgaaaagcaagcaccaaagtttttaagtaaattaaataataaaacaaaattaccgatgcgttcattagtcaccacttacattttagtagtagcaattattattctagctaatttctatgctaatgcagtatttagcttgttaaatattattggctctttagttattattgtatgggcaataagtgcatgggctcaaatacgtttacgtagaggtattaaacgtcaaggcaaagatattaatacattattgccttataaatcaccacttttccctctaggtcctatcattgtatttgctacattaattttcttatactttggtaattctatcggtgatttatttagtggtaatataggtgatttttttgttaatatcatgcctttaattgtcttagcgattatctttatcgtacataaattgattcgtaaaactaaatttgtaaaattagatcatatggatcttacagctcatcattatcatgattaatatcatcgtttatttaggagtagaattaaatacaattctactcctgtttttattactaaacacaatatgtatattttctaatagtcgtttattttgtataatgagtataacgataacgacttagaggtgactgagtatggtaggtcaaacaaatttatttgatgacgtaataaagagcgatgaacgttttgttattgtcgtacaatctttagaagaaagaaatggacaattactgaaacgcacattgcgtgagtatcctagtctaactcatgatcaaatggaaaacttatttacacatttaaaagatgtatttcaagatgagccatttcgcgataaccaatctgcatatacagtaacagtatatacaaatttagattatgcagctgatcaagtatatgctcatgtaaaaagaaataaaggtaaacgtgattggacacacactgctaaataactagttatgataataaaaaaaggaagcgaaacttgattcaatacgaattcattccgcttccttttaatttatataaatgttttatagcaattctttaagtgctgctggtataccattagaatcattatctaatgtaactttatctgcaatcttttttaattcttcactcgcatttcccattgctacagcatatcctacaacttcaaacattgattggtcattgaggctatctccaaaacaaatcacttctgataatgaaatatttaacttttcacataaagctttaattgcattacctttagaaacatctttagccatgaattccaggaagaaaggtttgctcgtcgtcacatcaatatcagaattaaatgttccatttaattcgttacgtgcttttgaaatattttcttcataatcaacgcccattgctttaggtacatcagactgaatatacgctttaatatcatccacttgtttcataggtagaccagttaattctgattcaattttacgatattcatgttctgtatcaaagataatttgtccgtcttgatacgttaatgttaaaaagcctttttcgcgacaataatctgtaattttatcaaaatgatctttagttacacttttacttacttcaatttcttctgttttagcattaattgttttaccaccattataactaatgatatagctttggtaatgatctaactttaattctttagctactggaatcattccctcagttggtcttccagaggctaaaacaatcttatatccttcttcttgtagttgaattaaataatctttggtttcaggactaactacattatcacttgttattaaagtgtcatccatatccataacaatcattttatagttactcatttcttagttgctctcctttcatttttgctcttatctattttacaataattttatgaaggatacacaacttcttcaataacacctacattattaattgttgcaagttcagaatcgcaagttgttatttctgattttaatgttctcacaagtgctccacttttttctttacgactcaatgtcaatatcgttggacctgctccactaatcactgtagcataagcatcatatttttgagatagtatttttactttttcaaattcaagaatcaagtgttgacgataaggttcatgaaaaccatcttgtgtcatcatttttccagcaaggtcataattatgttgaattaatgcacaaatcattgtattgctaatcgcactattttgaactgctttctcatgtgaatacttatctggaagtaccctacgtgagtcttctgttttgagttcatatgttgggatagtaagaatcacatctacatcaggtatatcaatatgtgccacatttgtttctttggtttcaggattataatatcctgcgagtaatccaccataaattgtaggtgctacattatcaggatgtccttctatgtcagtagctagttgtagtaattcatacttagataattggatattaccgaagtagttagcgatatataatgctccaactaaagcggatgcggatgatcctaaccctcttgctaatggaatttcacttctcatcgacacttttaaattaggtaaagtcacattatatttttcagctacttgttgtgcaactgtatagatataattacttttatctttcggtaatgattctaactcttcgtttaaatatctaaattcccagttacttccttccgcttcctcaacatataggtataaatatttattaattgccataccaatagaatcaaatcctactcctaagttagcagttgatgcaggtattttcaggtgaagtgatggcttcatattaaagtgttcctttaatataattgataatactttctttattgtttggaagcggttgaattggattatctaaaactgagatagcagtgtctggatcttttagtccattaccagttaatattgctactacttttttacctttcgacaattttcctgcacgttgtaatttgattaaaccagcaattgaagcattacttgctggttcactaaatacaccttctttagatgtcattaattgatacgcttctaaaatttcatcatcagtcacactatcaatgaggccatttgattcttctaacgcaacagtcgcttttttccaacttgctggattaccgatacggattgctgtagcgattgtttcaggatttttaatgactttattttgaacaattggtgaggctccttctgcttggaaaccaaataattgaggaagttgacttccttttttctcatgatactctttaaagcctttccaataagcagtaatatttcctgcgttgcctactgggattgctagaacgtctggagcttcttctaattgctccacaatttcaaatgcacctgttttttgtccttctattctaaatggattaacagaatttactaattcaatatcatcatcattttgtgcaatctctttaacgatttctaatgcttcatcgaagttaccttcaattgagacaatttctgcaccatacatgaccgcttgcgaaagtttacctaaagcaatctttccttcgggaatcactacaattgcttttaaacctgcacgtgcagcataagctgctgctgaggcagaagtgtttcctgttgaagcacaaatcactacttttttaccttgttctttcgcttttgttacagccattaccattcctctatctttaaaagaaccggttggattagcaccctcatatttaacatataaatcaatatctagcatttctgatatattagcacagtgaatcagtggtgtatgtccttcatttaaagtaagtttaggtgtatcttcattaaccggtaaataatctttaaattcttctactaaaccttgccatcttttcataattattaaactccttcaactggataaattttttcaatgttgtaatttgctttactaagtagtgattcaggtgattggtctaatccgataatcacaacgccataagaactagaatcacgttgttctatttgaagtgatttatggaatggtaaatctgatttaagttgatctttaagtttatcaattgattcattactatgaatgacaacatagtaatttaatttttctccaatagcaattgcgtcaccattatccattaattctcgagttttatttgtttttaattcgaaatgaggtggaagtgtatgtaaatttgactcaaagaagagtgctacatttaataaatcactcactactgcactaccagtagctaagctacctgcccctttaccataaaacatagtatcccctacagcatctccaataacataaattgcattgtattcattttctactgctgcaagctgatgtgatttatgtattaaggttggttcaacggatgcattaacttcgctatgatgatatgtacttttaccaattaatttaatcttataacctaatttgtctgctacattaatatcagataacgttgttttactgataccttttactttcacatcatttaacttaattacttggttaaatgataaataagaagtaatcactacttttctagctgcatcaataccttccacatcatcagtaggatctgcttcagcaaatcctaatctttgtgcttcagcaagtgcatcttcaaatgaagtttgttctcttgtcatttttgaaagaataaaatttgacgtaccatttaaaatccccataaatttagagatattattagcatttaacccattattaatcgcgttaacaatgggaataccacctgcaacacttgcttcaaattttaaggctactccttgttgttctgctaggttctctagtaattctaaatgcacagcaagtagatctttatttgctgtaatgacatgtttttttctttttaaagattctcttaaccaatcaacagttggttcaattcctcccattacttctataacgatatctatatcttcatcgtttaaaatttcattaatgtcttctgttaaatgatattgactaatattaataggtctttttttagtggtatctcttactaaaatatgtttaataacaatatctttatttagagtatctttaatttgttgtcgattttcttcaataatttttactacacctgagcctactgttcctaaccccagtaatgcgacgtttaattccttcataatttttatcttcctcccatttgtattattgagaagtacaattgttttattgaaaaacacttaaatttattatactattaaatcaaattagttgaataggacttttaaaagaaaaagtgaatatgtagatatatattatcatgtagtatcaggaaattaaatagaattttctgattttttagaaaggttggtaaattttatgaaagttgctaagtttggtggaagttctgtttcaaatgcaacacaaattaaaaaagtcctaaatatcgtcaatgatgacccagacagaaaaattattattgtatctgcacctggtaaaagacataagaatgacgttaaaacaactgacttacttattcgtctatatgaaaaagtaatcaatcatttggattatcaagataaaaaaagagagattattcaacgttatgcagatattttagaagaattaaatatggagtctacactcttagaaacaatagatgaaacacttgaaacaatcattaaacaattaaacgataagcatgatcgtttatacgatgcattgttatcatgtggtgagaattttaatgctcaacttatcgctaaatacaacgattctcaaggcattaaaacaacatatctctcaccaaaagatgctggtatcttagtaactgacttaccacaacaagcacaaattttagaagacgcttatgataaaatttataaattaagagaaattgaaggaaaaattattatcccaggtttctttggtgtttctaaacataactatgttgttacatttccgagaggcggttcagatatcacaggtgcaatcatagcacgtggtattaaagcatcattatatgagaattttacagatgtatctggtatttttaaggcaaatccaaatgtaattgaacatcctgaacttattgaagaaattacatatagagaaatgcgtgagttatcatatgccggctttagtgtttttcacgatgaagcattacagcctttatataaacatagaatacccgtagtcattaaaaacacaaatcatccagaggacaaaggaacctttattcgccatgatcgtgaagtcacagataaaaatcaaattattggcattagttgcgataaagatttcacagttataaatattaaaaaatacttaatgaatagacaaattggttttacaagaagaattttagaaatattagaagactatcatatctctttcgatcatatgccatcaggtattgataatattagtattattatgcgttctaatcaaattaaagacaaagagaatgaagtattgagtgcgattagaaaaaaatgtgatattgatgaattaagcattgatcatgaccttgccatcttaatgattgtcggtgaaggaatgactcaatctgtcgggactgctaacacaatcacacatgctctagcagaatccaatatcaacctaaaaatgattaatcagggtgcttctgaaatttctatgatgtttggtatttcaagagaaaatgcagataaagctgtgttatcaacttatgagtattgctatcatggtgtatgcttaaaaaatttatgtcctaaataacaattacataaaaaaatctgagacatctatttgtctcagattttttatattaaacttttagtgtaagtgctttttcaattttatgctctcccactaccatttttaaaatcacaaattgataatagcttagagcatctaaaactgacttataattggcttctaaattattttgttgataatctaataaatcatacattaatacgatttcaggtttaatataatcgacatcccaagttaatgaatgaaaataaatactatttttaggtagtcggatattagtgtttagtctaaatatacattcctcatttataacatcataaataaaaatacttaaaataactttatcattattaacaacgtttatttgagaaatagatggaatatctaaattatttttatccatgttatgattggacatatcataatatttaaatgtataacttgaaggaataacttttaaaacctctactattcgttttctttctacacaaatatcgactttcgaaggtaattcaaaaagttcatttaaaaatagttgaatagcaacttcaccgtgaaatttgaacgctgtacggcattgattttttaatattccaactagttcttctacatgattttggtgatgagacatacaactgtcctccttaaaggaaacgctttcataagttaattatacagacacaattttatattttcaattttaatttgtgaaaaatttgtaattcttttaactcttctttaggttataagatataattttacacaattttatatttataataatgaataaattatatcctgttattatgttctttttcaacttaaattatcattttttgtttattgaacattaaatatattttgtttataattaattattgatttctatagaaaattaatttagtcattaatcttctaatttacaaatattaaacaggaggtgaacatatgacacatacgattattctgattattattattgttattcttatacttgcatttatacttaatcaaagatacatgcaagatagaatagatactgaagtttacgctaaaaatcaaatggtctctaaaaattctttactcagtaaagaaaatttagaacttaaaaataaaatattaagttctaataacgagattagtcctcattcaaaacgtaatgctaaacgtgaattacaagatatcttagaccgttttaaagcttcaggaaaattaaaatattataatatcattacgactagtaatttagctactaaacatccactgtttgagtatgcaagaacctttgactatatagttgtatctgacgtaggtcttattaatattgacgttaaaagttggaaacaaaaaacattttatcattttgatttacctacttctgatcacttagagggtaatgatcaaagtgtagaacaaattgtaggtcattatattagtaagcaatatcatagtcaatttgattcaaatcgtaatgaaatatatacttttgttgaaaaaattcaaaacaatcgagtcatctatgaattttatcaacatgatccttatgaacaagctgctattaatgcaaaaatcttaaaagatggcattgaaaaatattttaatcataaagttcaaagtattggggtcatttattttagtgatggtagtgttaatataattgaaggtgctggcgaaagagagaaatatattgatacagtatccacgaaatcttctttagaatctgtgattaataatgctattgaattatctaaacaccctctatctgaaactcaagttaatactattgttgaaaactttcataactaaacaatgagtatgggagaacattcttgacgaatgttctcccatactcattttttaactccaaagattcactttatcttttttagcttgctgttcatctttttcaaatgtacttctatatttaccgttaggtgaaaagtatttttcacgagctaatccttttttaactaattcttcgttatacattgttttttcatctaaccatacataggctaatgtacgaccataacggtcttctttttccttatcatattctaaatacacatctttattatttaaatgttgtttgctgtaattagaagcttcttttccataaggttgaactggtgtgttaggtttaaccgtttctggtgtatcaacaccaattaaacgtaccttaatttgctcaccatttgatttcttagccacaaatgtatctccatctacaacccgatcaacgtggactttttcttttcctttaaattctgtctgtgttgaattagatgaagaatgttgactatcgtctttaaatggccctgtatgatttaaaaattgaaatgctaatacgccaataacaatgacagcaaaaacaattattgttaaatttttctttgaattcataggtgcctcctatattatatttttaatactcaaatataatatataatatgtatttaataatcaatcaatactttcgacctaaaaagtctacctatattgaatttattttcaaaaaatgattaattgatattcaacatgatataattatacatgttaggagtgaaatacatgagcgaacgtaatgaaaatttagtcacgatgattgctgtcgtaattgctattatcgttggcgttattttacaaatcgtttataaactgcctattattgtttcggttgttatagcagtattgttaggcattttagttggatttattgtttatattattcaaagtattatacgtaaacgaaaagataaataagggagtatcatacaacgtcactctcaataaaagactgaattgaaaacattaaatatcattcaattcagtcttttttatatattatttaaaattttttacttacttttatatccatcctttttctttcgcctgcttccaagcattaaaccgattatctgcatttaatttatcaattatattagacgtataatttcttactgttccatctgagagataaagtttttctgcaatttctttactacttagattatttccaatttcacgtaatacaacttgttctttatgtgttaagggattagattctttaaataaagtagtcattaatgaagtactatactctttttcacctttcatgacattttggatagtttgtattaaatcttctactgaacgttccttcaatacgtatgcatctacatcattagccacagctttttcaaaataacctggtcttttaaatgttgttacaataatgactttagtatctaatttaaattcttttattttaactaatacttctaatcctgtcagtccaggcatttcaatatctaatatagcaatatctggatgatacttttcaataaaatcaaatgcgtcaaccccattaccacagtcctcaatcacgttcatttggtcattgaattcaatcagttgaaccatcgcttttcgcaacatatattgatcttctgctattataatgctaatcatttaatatcctctcttggtattataatacgtatatgcataccacttttatctttaatttctagctttccattaagaaattgaactctattttctatactttctaacttaatgtcttctgtatcgtttaaaccttttccattatcttgaataattaagtagagttcatttttttcttgtctaacctcacaacagattttactagcatttgcatgtttaatgacattattgattgcttctctcaaaatcattgatagtatagattgctttgttggatttaaaacatttacctttcttatattttttaattcaaattgaatgtttgcatcttttaaaacagtttttatagattgaatttcctcttcaaaactttgagattttaaattttcaataatatttcttaccttaattaaggtagctttagatatctgattaatcgctaatatttcatttttagctttttcttgatttttatcaatcaacttatatgccaattctgattttaaactaaggcttacaaatacatgccctagtgtatcatgtaaatcttgccctatacgttgacgttcttgttctgcaattaatgtattaatatacttatttttctcttctatttctttttttaatgctctatcttttttagttttaaaatttcctagtgtaataattaaaataactaaataaaagataattaatacagaaacatattctatttgataaaaacttgtaattgtgagacataaaagcattgcaattataaatgtaataaattctttagacttaattgttacttcaaacatgaaaggtaatgcaaatgcgctaaagaaaaagaataagctattcattggattaatagtataaacaaaatatataattcctacataatgaaccactaataggctatatattacgttattgttaaatcgataataatatattactaacataagataagacacaatgaaaatagctaaaacaattaaatatacagtttgagaacctcgtttttcattaaagatgcttataattggaaataacaaatataaaagcgtagaaagttctcctaatctaatactccattttcttttttccatctagttcacttcttttctttggttaatccacattgcaataattaaaaacattatactatatacaattaaagtaaataatgaagtaatgtttaatccttgatttttaactaattccagtgccaaatttttcaaatgatatgttggagtaattttcgaaattttttgtaaccaaattggaaatgtttgaactggaaaccacaatcctcctaatatcgctaacaacatattaattatgtttgctatactatttgccttttgtgtctcattaaattgagcgattactagtcctaatgttaaaaataaacttgcacctacccataatgaaacacctgaaagcaaccattgttgtatactcatgtttacgtgtttatatagatgagcaacagtaaaaattaaaataatagccaataaaaatagcattattgtttttattattttagtagtaaaataggttttactagataaaggcgttaccattaatcgtttaaaccaacctgtgtttctttcttcaataatctctataggaaattgcattaaacaaaaactcatcaagctaaacactgtcatactatacatatattctttatagaactgctgtttctcctcttcaggtaagtctagtaaagaagtaaataataaataaaagcctaccggtaatatgattgataagaatgtagttagtttctttcgaaaaataattttaaattctgtttttaataaagcgatattattcatttttagtctctccctcttttacatcagcaaataaaattgtttctaacaatgtttgcttttcaatagtaatgtcatttaaatttaaatttaatttttccaaataatatattactttcttaacatcagatgttttaatttttaaagtagtatcttcaatttttacatcaaaataatttgttaaattctgtaaattattgtctactgtatttggcactttaattattgaatattgttggttggttaatatatttctaggtgaatcatttaacttaataataccttgatcaagaaatataactttatctgccattcgttctacttcttcaatataatgagaagtataaaaaatagatacattttctttttttaatttccctatcattgtccagaaatgttctcgcatttcaacatccatagctgcagtaggttcatctaaaatgagaagctttggttttcctattaaacacaatccaaaatctaatatacgttgttgtccaccagataagtgatttgcatacagattcaactggctatcattcaattttgtaatttttttaaattcatctattgaaattgcatccttgtacagttgacaaaataatttatataattcttttacttttattaacctaggaaaagatgttttttgaaataatacaccaatatgatttaaatttaatacatgatctatatctataatttctcccgtatctgctttcaaatgattaattaaaatattaattaaagttgattttccggctccattttttcctattaatgcagtactcatacccttttctatatttagtgatatgtttttcaatactgtctttccattatatcttttagataaatgtcgaatttgaatcataactcatcacttccttttgttaatatcaataatttatcaacaaacaagttataatttcagataaaaatgtcattatttttaagtgacatttgtcacattaataaaaccgacaaagcacaatgctttgtcggttttattaattcttacaagattggggataataatttggcaatatcttcttttaatttaattgataatggccgttttttatatttctcaagtgtaagttgtttagactttttaatatcttctttatacgcctcttttaacttcttagctaattgttcatcatatacgaatgcattaacttcaaagttcaatacaaagcttctgtagtccatattagatgaacctacactactgacttcatcatcaatcattaacattttagaatgtataaatccattttgatacgtatacacttttactccatactcaagtaattcaacaacatttgaaaatgtagaccagtagacaaagggatgatcaggtttacatggaatcattatgttaacatcaacgccagtattggctgccattttcaatgcattaatgtaagctcgatctggtataaagtaaggtgtttgaatataaatagattttttcgcactcataatcattttggtatatccaaactcaatttgatgtaattcatatgcaggtccacttgaaccaatttgaatggctgaatgaccattgtgtactttctttttaggaaaatacttattatcatattcaaattgtggacgatgtgcttgagagttccaatcaagaataaatctaatttgaagtgcatttacaacatcaccttgtactcttaaatgcgtatctctccagtatcctagtttacctaaacctaaataatcgtcacctacgttaaatccaccaatatacccgatttgaccatcaataacaataatcttccgatggttacgattattcattctaaagttaataattggtagttaagatgcaaaaaatgcttctacctctccacctaatgattcaaaacgtttaaatttgtgacgttttaatttttttgaacccacatcatcgtagagtaatttaacttctaaaccttcttttaactttgtttctagggcatcgataattcgtttgcctagaccatcgatttcaaatccaaagtactctaaatgtatgtaacctttcgcattataaatatcttcgattactttgtcatataattcatgaccatcaataaataaatcaattgtattgtcttcagtaataaaagcatcttgtttctttaatagcattcttgccatatcttgatgattttgtagctgcttattttctgtatgatagttgtgatgatcaattttatgagcttgttcatcaattaaatctttataaacatctaactctttaccattatttttctccatttttctttttgaaactgttctaccgaaaaatagataaagaataaatccaagcactggtaatacaaataatacaaatatccaagcccatgtcgaagatgcactacgtctgttacgctctagaaaaatcaaaataaaagccaacactaaattgactaaaaatccaagcactaaaatgatattcaatattgtaccaattttagggccaaaaagacttatcataattctaaactcctacttctcaaattcaacttttatttatcggctaatattaaaaaggcacttaatatttcttcattattaggaaattggcgttcttcaattttatcaattgaaacatttaataattcatagcgactaccttcttcacttgctaaatattgattaatttcattttccaattcttcaattgtttgttcttgaattcttttaaattttactttgctcatttgtaacactccatttcatatatttgtttaaatcatagtctttttacatatatttatcaactaaattgtaaggataataggatatcttttaaaaacgcttacatttttatttttattcacttaaattcacatttgtaaaaaggtggtgtatactaaacacattctattcgaactttcagaataatcagtttagaataagcataaggaagttagggaggaattcgatgatatcttttgaaaatgattacctagaaggtgcacatccaaaaattttacaacgttttattgatacaaattatattcaagcttcgggttatggggatgatcaattttcaaaacaagccgctgatcaaattcgaaaaacgattcaatgtcctgaagccactgttcgctttttaattggtggtacacaaacaaatcaagttgttattaatactgtattaaagccatatgaaggagttatttcagcagatacaggtcatgtggcagtacatgaagggggcgctatagaatttagtggtcataaagtattagcagtgccatcttatgaaggtaagatttcacctaaagaagtaaatacctatcttgaaactttttatagtgatttcaagcgtgaacatatggtatttcctggtatggtatatatttctcatcctactgaatatggaacgctttatagcaaagaagaactcaagaatttatcagacgtctgtaaagaacataacattccattatttatggatggtgcacgattaggttatggtttaatgagtaatgaaacagatgtcacaattgaagatattgctaattactgtgacattttttatattggtggtacaaagattggtgcactatgtggtgaagcgattgtattcacaaataataatgaacctacacatttcactacacgtattaaacagcatggtgccctacttgctaagggacgtttagttggtattcaatttttggaattatttactgataacttgtattttgaaattagtcgacatgctattaatatggcgaataaaatgaaacaaggatttatcgataaaggttataaagtgtattttgattctcctactaatcaacaatttttcgtattaagtgatgataagattaaagatcttcagagtaaagtgaaatttgcaatttgggaaaaatacgatgatacacatcgtgttgttagatttgcaacaagttgggcaacaactgaggaaaatatagataaacttttagaattaatttaactattaattgatttaatatagaccttaagatgacgtactttgggtctatatttttatgtttacataatatttttataatttataaaggttttactgatatatttaataaatattatctaaaataggatttacatattatgaaaaaaattagtggcaggcgaacatgaaaaacaaaaaaaatatacttcttaaaatatcgataaaaaagataaaaaaagcaagataataacaaaaataaaaaacacatcatcttatcatttgattacttaaaactctcaatcaaactgcaaataagaatcaagcagcaatactattcaaaataataatagtaaacaaaatcaatattataatgaatggtattaactggtgatacgattggatacatcacacctgatgatacacagtgtactatatatctccgtcacaacaaaatagtaaccagaaaacttataatcataacgaaatttacagaacgaaagaagagcaaaaagtccgtaatcacttgattaatagatacaatatcaagttgattggtcaaagcaacattaaaattaatgtatatacttttatttattttcggaatatttctaattaaaagaagtttttctcattttctatatttgtgcgtcattattgtctaaattcttattgttctgtctttctgtcataatattactttgaatgttctaaataaaaattaacatttataaactaatattgaaaattaaataaaaagctaaacgatctatgattaaactaaaaaattttgaaaagtatataaagaatgttttttaatacttacttgaccaaaaattgaccaattcactactttttaagaaagtgatcaagtaaaaatagattatttttaaataaaaaagaagctaaggcatgtgccttaactccttatatccctaagtctttcccctttttgcttagcgattagtattgtttcatatattgatcgcgttcccattcagacacttgagttctgtaatagtcccattcgatagatttagaattaataaattgattatagatgtgattgcctaatgcttttttaactgtatcgttttcacgcattgattttaatgcagtataaagtgtagatggtaaatcttgaatacctactgcttcacgttcttcacgattcatttcataaatattttggtttactggttctggtactttagttttgtttttaataccgtctaaaccagcttgtaagatcgcagctaaagccatatatgggttagctgctgggtcaactgaacgtacttcaatacgagttgataaacctcttgaagtaggtacacgtactaatggagaacggtttttaccactccaagcaatgtaacatggcgcttcgtaaccaggtactaaacgcttatatgaattgactaatgggttacatactgctgtaaatccacgtgcattatttaagatacctgcagtaaagtgataagcatcttcagttaattggtctttgccgtttggatcaaagaatgcattttctttacctttgaataaagatacgttgaagtgcataccacttccatttacaccaaataatggttttggcataaatgtcgcatgtaaattatgtttacgtgcaattgttttaacaactaatttaaatgtttgaatgttgtcacatgctgaaattgcatctgcatatttgaagtcaatttcgtgttgacctggtgctacttcatggtgacttgcttcgatatcaaagcccatatcttctaattcaaggacgatgtcacgacgacaattttcacctaagtcagttggtgctaagtcaaagtaaccaccattatcatttaattctaatgttggttcacctttttcatccaatttgaataagaagaattccggttcaggtcctaagttgaaatctgtataacctaagtcttccatttcttttaatatacgttttaagttcgtacgtggatccccagcaaatggttctccatcagttgtataaacatcacaaattaaacgtgctactttgccttgacctgctgtccaagggaagataacccaagtatctaaatctgggtataaatacatatctgattcttcaatacgtacgaaaccttcgattgaagatccatcaaacatcatttcattatctaacactttttctaattggcttactggaacttccacatttttaattgtgcctaagatatcagtgaattgtaatcttaaatatcttacgttttcctcttttgcaaatttgcgaatatcttcttttgtaaaagtacgttttgacatggtagacatcctccaagttattaattaataaatcgtgataaatcgccacggtttatcggtaaagcttcactgcgcggtttctgagttgcatctacaatcattctttttctcgtttcttgttcatcagtagttaagtgcccttgattatttgtaattatttgtttaataccttttaaattaaaacctttttcaattaacgctttaatttctaacagtctctctaagtcattcatagagaataaccttttatttccttcggtacgttcgggcttaatgagttcatgtgtttcataataacgtatttgtcttgctgtgagttctgtcaatttacaaacaacactcatagagaacacggccatattacgtcttattgtatcgttagacactataacctcacctctacttttgaacttgtctataatttagcatagattaatacgaaatacaaaaatatgtcaggttttcttacatgaaaattaaatatttcttacatataaacataaagcccatagatacagttatctacaggctttttactatttaaaaattattttttacgacatcaatacgatagcgtattcttattgttgagttttgaaaacttaagcttcattaatggttatcttccatatttgcttcaaaatcatcaagtaatgctcgagcttcatccacagtttctgtactcattaattgatgtcgtaattcacttgcacctctaatacctcgcacataaattttaaagaaacgtcgtaaacttttaaattgttgtgtttcttcatttgaatacttttcaaataactctaaatgtaatctaaataaatccaagagttctttacttgtatgttcgcgtgggtctttttcaaaagcaaaaggattatggaaaatacctcttccaatcatcactccatcaataccatatttcgtcgcaagttccattcctttttgtctatctggaatatcaccattaatagttaataatgtttgaggcgccacttcatcacgcatttctttaatggcttcaattaattcccaatgtgcatcgactttgctcatttctttacgtgtacgaagatggatagataagtttgcaatgtcttgcttaaatacatgtcttaaccattctttccattcctctatattataataacctagacgtgttttaacactaacaggtagtccacctgccttggctgcttgaataatttcagctgctctttctggtcttaaaattaacccagaccctttaccctttttggcaacatttgcgacaggacagcccatatttaaatcaatacctttaaagcccatatctgctaaaccaaaactcatttctttaaattgttctggcttatcaccccatatatgagcaaccataggctgttcatcttcactgaatgttaaacgccctcgtacactatgtatcccttctggatgacaaaaactctccgtatttgtaaattcagtaaaaaatacatccggtctcgctgcttcacttactacatgtcgaaaaacaatgtctgtcacgtcttccatcggcgctaaaatgaaaaatggacgtggtaattcattccaaaaattttctttcataattgatttaaaccttcttattcattagtatctcgcataattaaccatgatatattatcataaaataaatccatatacaaaaagaaattcactctcattatttttattactatttatttttgaatattttgttatactacttaaattaaattctgttcttttaaattcattactgcacgtgttactgcaattttaacatgttcataagttagaccaccttgcacatatgcctcataaggcggacgaatcggaccatctgctgataattcaatagaggagccttgcacaaatgttcctgctgccatgatgacatcatcttcataaccaggcatataactaggttcaggactaaagtgtgcattaattggtgaagcatgttgaatactttgacaaaatgcaatcatctgttcttttgtatcaaattgaacggtttgaattaagtctgtacgcttagcatcgtacttgggtactgtgttcatattcattttttcaagaagtaaacttgtaaatagtgcgccttttaagctttgactcactacatgcggtgctaaaaagaatccttgatacatttcttgcaatgaagataatgaagcacccgcttctttaccaatcccaggtgcagttaaacgataaccacatcgttcgattaaatcttttcgtcctgcaatgtaaccaccaattttggctaatccaccaccaggattttttattaatgaccctgcaattaaatctgcgcccacttctactggttctcgacgctctacaaactctccgtagcaattatctacaaaaacaattacatttggatatcgttgtttaatttgagaaataacattttctatttcatctactgtaattgaaggtcgttggccatacccttttgaacgttgaatagcaacaactttcgtttgtttcgaaatagtatttaaaaccatttcaatatcaatcattccattttttaatgcaacttctttatatgtcacaccatgctctttgagactttcaataccattaccattaacaccaatcacttcaagtaaggtgtcataaggactacctgtaatgtacatcaattcatcgccatatttgagtgtactttgcaatgctaatgtaattgcatgagtacctgaaataatttgagatctaacaattgcatcttctgctttaaacgtataagcatatatctcttctaaatgatcacgtccaaaatcatcataaccatatcctgtagaacctactaaatcattctcgctcgctttaacatgatgaaaagcatcaagaaccttttcctggttgatataagcagtttcttcaatttctttaaaaaagggtgttaacgtttcttctacttcagaaacgatgtgttgaatatctgacatgcaatttatcttcctttatatataattattttctatatcctttaacgatataactttcattattctcatcaaatttcatttcttcgataagtgtatgttgttttaaaaaatataatctatctgcatcttcactagatacagtttctacgtaatatgacaaagtcgcttttatttgatcaaacagtaactgcttcacttttaatttatcttcactattgcgacttgatacaaatacagacggatggtctgatactggtacatcagtttcttcagaacattgatcttttttattaaaaatgattgcttgtggaaggtcatccatatctaagtcttttaccaattgattaaccgtatcatattgagcgcgatattctgaatgacttgcatcaacaacatgtagaagtagatttgcgcttttggcttcttctaatgtcgacttaaatgctgctactaatgttgtaggcaacttttgaatgaagcctacggtatcagaaataattaaattaaacccattgttaatttgtatttgtcgtgttttagggtcaagtgtggcaaatagtaaatctttttcaaaagtcgtttcgtttgctaaaacattaaaccaagaagattttccagcattggtatagccaataagtgcaatttgaaatacttgattttgttcgcgttgattacgatatctttcacgatgttcgaccactgttttaagttgatgtttaatttcattcatacgtgttctaatatgacgtctatccatttctaattttgtttcaccaggaccacgcgtaccaattcccccgcctaaacgagataaactttttccatgtccttgtaatctagggagtaagtaatcgagttgagctaattcaacttgtaatttaccttctctactacgcgctcttaaagcaaaaatttcaagaatgagctgtgttctatcgataattttaatgcccaaattatcatttaatgttttcgattgtgctgttgttaattcatcatttgtcacaacaacatcgatgtcatgaaattctataaaagctttaatttcatcaatcttacctttgccaacataatatttataatcaaattgatctttattttgagtgacttgtcctataacatctaattgacaagtcaacgctaaagcttctaattcttccattgtagattcaaaattatattgatgatcactttgagcatgtacaccaactaatacagcagtttctagctttttcttagtatcataagtgtgttgctgagccatgatatacatctccttttttaacatgtcttacatattctatcatagagcaagtttaaagactaacgactaaaactatgttaaattaaagctaagttgaaagggtgatagtatggaaaatatttatgattttgaagttcaaaaatctaatggtgaaaattataaattagatgtatataaaggcgatgttatgcttatcgttaatacagcgagtgaatgtggatttacaccacaatttgaaggattacaagaactatataataaatataaggaccaaggatttattgttttaggtttcccatgcaatcagtttggtggtcaagaacctggttctggtgctgaagcaaatcaaaattgtaaaattaactacggtgtcacattccctattcacgaaaaagttgacgttaaaggcgataaccaacatccattgtttcgttatttaacaagtcaagctaaaggtatgttaagtgaaaaaattaaatggaattttactaagtttttagtagaccgtgaaggtaatattgttcaacgcttctcacctcagaaaaaacctgctcaaattgaaaaagatattgaaaaacttctataaataaataaaagcttcaatatagatgactatgtcatagacaatcgttctatattgaagctttgttttattacaaacatttcttctatttgttcaaaagtgcaaaaattgatgagaattttgcaagctacgtatacattttgaccgtggactacgctctaaaagtcagtaacttggcactttaattacaacttattcttcaccttcacctgtagcttctgaatcagtagattctgtatccacagtgaaagtgctgatcgcatgtttgtaaatcaaatgttgtttgccttgagaaactaagctaatcatgtatttatcaaagtcttcgataacgcctttcatttgaaaaccatttaagaaaaatacagtaatttccgtttgttctgctttaaagttctctagtgcttgatcttggatgttttggtttgcaatcatgtttagaactccttttatttatttgggttgtaatctcatctaacatcatttgaagtgacattgtctctctatcaaaccattgaacattcattttgtttttaaaccatgtgagttgccttttcgcatattgccttgaatgttgtttcaataattctatagctggttctaattccatttctccttttataacagggacaagttctttgtaaccaattgcttgcatactctgactagattcaaaaccttgttcaactagtgctttcacttcattaaataatccgtggcccaacataatatcaacacgtttatttattcttgtatataatgttttgcgcgacatttcaatccctactaataatgtatcataattttctgtaaattgttgaactttctttcgagaacttaaaagtttttttgtttttaagtaatattcaatcgctctaagtactctttttctattatttggatgaatatctttagctgatgtttcatcaaacgatgctaagtagcgatgtaagtcatcattatttaattgatttaatacatctattttttcttttactcttaattctttttctactgatatattttcatcatcaaatggataatcgtaaattaaagattgaatatataaacctgtacctcctgcaataataggtactttacctctttttgtaatatcttcaataagcacttctgctctttttttaaattcgtatgcagaaaatgattcatcaggatttaagatatctattaaataatggggaatcccttccatttctgtttctgttacctttgcagtacctatattcatttgacggtatacttgcatcgaatcgccactaatgatttctccattcatttttttagctaattcgatactcaattctgttttacccgaagctgtcggccctacaatgactactagaaaaggtttttttgatgcttgcaatgattacgcctcactctgattatttttcaatacttgtttttgaatccaatcaaacatatgattccatatcatttgttgatcaacttcaaataatatttcatgtcttctatttgcataaagttgtaccgtaatatgtttaataccagcttttttaaattttctggccaaggatttaatacctctgccatactctccaaaaggatcattttttccagaaatcatcaatattggtaactgtttatttattttttttaattgactataatttgcagtacgtgtcatatgttttactgtttcataaattaattggtttgaaactaaaaagccggtatactcatcgtttacgaatttatcaacttctgtagactgtgatgaaagccagtcactttcagttcttggttgatcaatctttttgttaaatgatttgtaaacgagttgattgacccattttaaacgcttgcgcttcccagtaaaaatagaaattaatttcaaactgatccctgcaggaattcctttccatttaggatattgtcctgttccagttaatatcaatccattagcaaaatttggataagtttcaacgaataaacgtgcaataatagatcccattgaatgccctaatacaatatagggtaatcctttctcactatcatataatgtttgtgcaatttcaaacgcatcttgaacgacttgattcatgctgtcgtaatgtccacgttctttctcatcaatctctttcccatgtcctctatgattatgtctaatcacatcatagccttgatgtgttaaagctttaacaagtgtttcatatcgatccatatgttcagccataccatgaaatatatgtacaataccataagtcgctatgtttgctttatctactttaacttctaaagttgttccatcttctacagttattttataagcactttgccccacgtatatgcctccaatctctttctataatggtattgttaacaacgtactattcctactaatatacctatactctttaatgttatcaaatagtttgtcactttttaataggttatatatactttaaactcaaaaattttatcaaaatataaaaaaaactgagattgagtgtttttacccaatctcagttaatatactattttaactatatttatttttctgcaggttgatgattaccatgtgttgcttcttcaatagcttcatcaacttctttagaaaattcatttttttgttcagcagtataatttaataatttatctaattcatcaatgattgcttgtttatattgtttaactgtattgatgtcaaaatataatttaccagtacgacgaattaagaaatcagttggtttatataccatttcgttttgtacactataaactaattgaacgtataattctaatggcatatttaaatctttttcattcgttaattgtgcaattgcgaataatttatctacatttgaaccgtattttgaagctaaattatgtgccacatctgtgcttaatccaagtgctttaccttcttggactttacgatttacgtagttttcaaagtttttactaccgccaacatctccaccagaaataggtgtatttttagttttgctatccgcaaattttagaccatattcttgttttaaacgcttagctaataaatcaacaatttctaatgccatgtgacgatatccagttaatttaccaccagcaatggtcaataatcctgatttaccttcccaaatttcatctttacgtgaaatttctgaaggatcttttccatcttctaaaattaatggacgcacgccagcccaagttgattcaatatcagcatccgtaacatgcacatcagggaacatataattgattgcatcaattaaatagtctctatcttcttggttagttaaaggttttgttttttcattattatagaatgtatcagtagtacctacatatgctttaccttcacgaggaatagcaaaaatcatacgaccatctttttcagtatcaaagtaaaccgcttgacgtaatgggaattttgattgatcgataactacgtgaacaccttttgttaaacgtaattgtttattattacgtgtataatctttctttctcacttcgtctacccatggaccagcagcattgattacttttttagcgttgatttgatactcttcacctgtaagcatatcttttactttaataccacttactttatttttagcatcgtatacgaagtcagtagatttagtgtgattaatgacttcagcgcctttttcagcagcacgtttcatcacttcaattgttaagcgagcatcgtcagtacgatattctacgtagtaaccgccaccttttaaaccatcttttttcacaagaggttctttatttaaagtcgcttgtttagataacattttttttcgttcatgacgtttaacgcctgctaaacgatcgtacattgttaacccgatattagttgtgaatttaccaaatgtaccccctttatgcatcggtaataacatccattcaggagttgttacgtggggaccattttcataaactattgcacgttctttacctgtttcagcaacaactttgatttgtgcttgtttcaagtaacgtaaaccaccatgtactaatttagttgagcgagaacttgtaccttgcgcaaagtcttgcatttctactaaagctactttcataccacgttgtgtagcatctaatgcaatacctgcaccagtaattcctccaccaataactacaacgtcaaattctttatttcttaaattctttttaattaagttcctattaaaagtagataatgccataatataccctccaaaatttatattaaaaaaagagagacctatacacacacagaagcatactgcatgataacaggtctctcaaatctcgactaatgtattaacttaactacatcataacatattctttgtaactaagccataattaaaaattaatcttctaatttaaagacctgagtagcctctactgctttcttccaacctttatataacttagttcttgtttcttcagacatttctggattaaattctttttctaatttccatccatcagcaatgtcttttttatcttcccaaaagtctacagccaaacctgctagataagcagctccaagtgctgttgtttcttgaacttccggacgttcaactgatgtatcaacaatatctgcttggaattgcattataaagttattttttactgcgccaccatcaacacgtaaattatttacttcaattcctgaatctttagacattgcttccataacatcacgtgtttgataacataaagattctaatgttgcacgaatgaaatgttctttttcagtaccacgagttaatccgaaaatcgcgccacgtgcttcagaatcccaatatggtgtaccaagacctacgaatgcaggaacaaagtagacattatcagtagaattaacacgtgttgcatagttttcagtttgcggtgcagaattaataattcttaaaccgtcacgtaaccattgaattgctgatccagatacgaaaattgatccttcaagggcataatttactttaccgtcaagaccataagcaattgtagttaacaatccactttcagacgttacaggttcttcaccagtattcattaacatgaatccgccagtaccatacgtatttttcacatcaccacgttcgaaacaagcttgaccaaataatgctgcttgttggtcaccagcaataccagcaattggtacttcttgaccaaagaagtgataatctttagtatgtgcataaacttcactagattctttaacttctggaagtattgctttaggaatgtctagtaattctaataattcatcatcccatttaagttcatgaatgttatacattaatgtacgactggcatttgaatagtctgtaatatgtgcttctccaccagatagtttccacactaaccaagtatcgatagttccgaataataaatccccattttcggctttctctcttgcacctttaacattatctaatatccatcttacttttgttccagaaaagtaagggtctaataataaacctgttttattacgaaatgttttttcgtggccttgttcttttaattcattacaaatatgttgtgtttgacgagattgccaaacaattgcatgataaattgggcgacctgttttcttatcccaaatgaccgtagtttcacgttggttagtaataccaatacctttaatttgttcaggatcaatttcattttcatttatcacttcagccattactgctaatactgatgtccaaatttcattagcgtcatgctctacccaaccagatttaggaaaatattgtttaaattctctttgcgcaacgccttgaatttgtccttctttatcaaataaaattgctctagagctagttgtgccctggtctattgacatgatgtattgttccataatttttctccttctttcattctgactgtatgtgttaagtatcctttgaatcacatagtcaatatattatatgatttaaaactaaaatttttcttttaataaatcgattcaatatctttatgtttatttgatttattaagcgctaaaccaatcagtaatgtaacaatcaaaactacaatgctaacaccactcataaaagtaaattcatttttataaaaaacctgataaatcacagcacctatcataccgccagcaattggccctagtactggtacaatagcataccaccaatttgatccgcctttaccagcaattggtaaaattgcatgtgcaattcttggtcctaagtcacgagctggattaatggcataacctgtaggtccacctaaacttaaacctattgcaataattaaactacccacaattaatggatttaatccatctgcaattttatttaccccaataaataaaatccctaaacttaaaatagctgtgccaataatttcacttaaaaagttagcaaaataatttttaatagcaggtgcagtagagaatacgcctaattttgcaccttgctctgtagttgctttccaatgtggtaaatacattaaccaaacaagtgtagctcctacaattcctcctagcatttgacaaacaatatatcctggtacttttacccaactaaaacttccctcaactgctaaagcaattgtcacagctgggtttaaatgagctccagaaaactgtcctactgcataaactcccatagttacagctaagccccatccagcggcaataacgatccaatcagattcttgtccagcgctacgttttaaatttacatttgcacatacgcctccaccgaacaaaataagaatgaccgtgcctaaaaactctgctaaataagcattcatgttttaacctcctacaagacaaaaagacttctacaaactataatataattaagcttgcagaaatctcttcatctctcattcaaatattaacttgtataaatcatacaaaataattgtaagcgttgtcaatagattttgtaaaaaagttgtcacaatttattttgtagattaaaataacgtactataatttttttttagtaatacataaaaaacctgagacctcaatttttgtctcaggttaaaaagataatttctaccacaattttctattacttgtggttacatagcttgcaccactattaatcgcatcattcacttctttttcttcttcgattaacccacctgctataattttagcacccgttgcttctcttacattttcaacaattttatgagcaatacctggtagtacttcaacataatctgggtccactttctttatgagttgtatactacgattgagtgcttgactatcaataataaaaactctaaaaatagtaagtacatttaatgattttgctttttgaatgacttttgtttttgttgaaacaatcccttttggtttataagtttgaatgatatattcacatgcatattcatcatgtgccattcctttaattaaatcaatatgaatatatgcttcaatgtcatgttttttaagtaactctataatgcttcttaaatgacctacatgcatatctaaaaggacacacactttataatccgtttgagttaatttctctaaatctttcatatttcgaattgctggtagtacgtgttctttcatttctatgcatcccttctacattactcgtttaaataatttttctaattcataatttgaaaagttaataataattggtctaccatgaggacaagtaaatggatcttccgcttctcttaattgatcaattaaatctgccatttcattctttttcaagtaatgatttgctttaattgacttcttacaactcatcataatagctgcgtcttcgcgcatttttttaacgtcaatttttttatgatttaatactagttcaatcatatctttaataatttcctctgcttctactttaggaaaccatactggataactatttacaatataatcatatccaccaaaatgttctaaatgaactcctactttatcaagttcttctcgatattgatcaataattaattgttcgtcttttgagaaatgaaatgttaaaggaattaacaaatcttgtacttcatttgatacttcgcctatcttttctctgaaatattcgtatttaatacgttcttgagcagcatgttgatctatcataaacattccattttcattttgagcaataatataggtaccgtgtacttgaccaactacctccatatatggcacacgtcgagacggtgttgaacttactttacctttaatatcttgttctttttgatttgtaacattctcttgaaagtcttcattttcatcataattataaatattggtttcatcatgtcgagtgttatcgattgaagactcagcacgatctaaactatttaaaatatctttttgaatgtcgaagtaatctttatccatactacgtttattattatagacactagaatgttcgttatcttctctagtgtaagaatcatcagaggtatgttcttcatcatattgagaacttattgttgaaaaggtattgttagtcgaaacgttggggtcatttttattttctaattgttttattttatttgaaatattttgttgtttttgttcaaaatcgattttttgctgttcaaacgtatgcaatactttattttttttaggtgttcgatctaaatcatttttaggaattaatattctatctttaaatgcatgtctaattttttcaataattaaattataaagttgttcttcttttgaaagtctaacttcaagtttcgttggatgcacattgacatctactaaaattggatccatttctatattgatatagcaaataggataacgacctatggttagaagtgtatgatatccttcagtaatagctttatttaaagcgaaatttttgatatatcgaccattaataaaaattgaaatataatgtttattactacgagaatgttccggtttagcaacaaatccttctaaatgatagtcactcgtatcgccagaaatgtgaactaaatcttttgcaactttaataccatatatttcagccatcacttcatttgttcttccagagccattcgtttttaacatcgtttttccatcagatataagtgaaaaacgaatatttggatgactcattgccattcgattaacaatatctgtaatttttcctaattctgtatataaacttttaatatattttaaccgagctggcgtattataaaataatgattctactttaatatctgttccttttttggcttttgctggtttttgagataatatttcaccattttcagcataaatttcgtgaccattttcattatctgtacacgttttaagtgtcactttagctacagatgaaatactagccagtgcttcacctcgaaatcctaatgttctgatatgaaacaaatcgtcatcatcatttattttactggtagcatgacgatgaaaaacaagttgcaaatcatcttgctcaattccagttccattatcgactacacgaattgaggaaatacctgattgttctacttctatattaatttcagtcgccttagcatcaattgcattttcaagtagttcttttactactgaactaggacgttcaaccacttcacctgcagcaattttatttgctaaagatgtttgtaattctttaattttacccatgaattaacacctctatcttaactgattttgtaattcgcttaacttaagtaatgcttcaataggtgtcatatttgaaatatttaaatttttaatttgtgcctctatttcactttgtgtttcattcgaattaaataagtcaaaacttgtttgttcaaacacatctgtttgtttaatagttgagtgttcttccttattaattaaatgatccttattttcaatatctttagagttgtcattatactgtttacgattgacattctcatctgataatccattttgttcaaacgcatttaaaataacttgagctctttcaattactttctcaggaagatttgctagtttagcaacttgaataccataactatcatcaacggcaccttctttaactttatgaaggaaaataagttcaccttgatactcatctgctgctacatgtacatttttcaaactagatagctgttgatctaatgttgttaattcatgataatgagttgaaaaaagtgtcttagcatgtgatgtttcagctacatattcaatcatagcttgcgctaaagataagccatcatatgttgacgttcctcgcccgatttcatcaaagatgattaaactatctgctgttgcgtatgttaatgctttttgtgcttctagcatttcaaccataaaggtacttttaccggatactaaatcatctgctgcaccaattcttgtaaaaatttgatcaaaaataggtaatattgcattatcacatggtacataagctcccatttgtgccatgatactaatgattgctacttgacgcatataagttgatttaccagacatatttgggccagtaatcaagtaaataaagttattttgatcaagataacaatcatttggtacataatcattataatccatcacgcgttctacaacgggatgtctagaattttctaagttcaatgtcttatcatcactaaattctggtctaacatagttatatttttgtgcaatttctgcaaaactttgtaaacaatcaagctctgatatcacttttgcttgtctttgtaatctttcagtatatgatttaacatgctctctcaatcgaataaacagttgatattctaattcaattgctttatcttctgcacctaaaataatatcttctttttcttttaattcgtctgtaataaatctttctgcattagataaagtttgtttacgatgatagtcatgctcgcttggttcgaatccttgaagattagcacgtgtgatttcaataaagtaaccaaaaactttattgtagctaatttttaaagatttgatacctgttctttcacgttctttcgcttgaagttgtgctagccaatcttttccatttttagatgcttctaaatactcatctagttgtttactgaatccttgtttgaacagtcccccatctttgactgaaataggtggttcttctactaaactatcttccaaaactttcagtaaatcttctaatggttctaatgtgctaaactgcgttgttgtcacattatccatttgttcaagaagtgatttaatatttggaatttcagaaatagaatgtttgagttgaatcaaatctcgagcatttacatttccataacttactcgtcctactaatctttcaatatcgtatacttgattaaggtaacctcttaaagtatctctttctataaaatgatcaataaatgattctacgatatctaatcgttgttcaatattatctttatgaataagtgggcgatcaatccactgtttcaagcgtcttgcacccataggtgtttttgtttcatccattaaccataataatgttccttttttactttttaaacgtatgctttcagtaagctctaaattgcgttttgcataataatccattttcataaagtcaatcgctgcataagttatcacatcttcaatatgagataaatctcttttttgagtatgatgaatataatctaacaataattgtgttgtcaaaaacattaaattattttctaatgtattaacactatattctatatcagaaatttcttctctaactgtaatcgtttcagtagtaagtgaaatttgtttttttaaatcttcatttatgtcttctcgtactacaatttcatttgggttaatcgtaatgatttcattaattaacgtgctttcatcttcaaaattggtagcttttaattcaccagtagaaacatcacaataacttaatgcgtatccattttcattctgaatgaaactaagaatataattattttgattttcatccattccgccttgttccatcattgttccaggcgtgactactttaactacttctcttttaaccatgcctttagtttgttttggatcttccatctgttcacaaatagcaactttatatccattgttaatgagtgtttcaatatagctatttgctgagtgatacggaacgccacacattggaattggattttcttttttagcatctcttttagttaaggtaatttctaatactctagatgcttctttagcatcttcaaagaacatttcataaaaatcgcctaatctaaaaaacaataagcaatcttgatattgagattttatttttaaatattgttgcatcataggtgtcacattagccatattttttcacaaccttactgatatatacttttttcttctcacattttaacttgtatattttaacatatgtcatactgaagcgctcgttatccaaattagaatattattctacaacttaaaaataaaagattatcatctctttactacgcttaataagcactaaacttattaagtgtatgaaatgataatcttaaataaaataattatttgaatttatctaataatcctcgtttttttaacactataagtaagatataactaatcgctgcaccaagaaaacttgaaactacaaatacaagcattaatggtttgataaagaaatgttgcaaacctaatatccaagatagtggaatgcacattaaactaccaatgattccagttccaatcacttctccaactgcagccataaatatgtgctttctatacatatagaagaggctagctagaaacacaccaatcatactaccaggaaaggcaaaagcactgccagttccaaatgttattcttattaaagaagaaatcaaagcctgtgctaaaccataccatggccctacaaaaaccgcacatagtacatttacaaaatgttgtactggggctgcttttactggacctaaaggtataataataaaactactaaatacgacattaaaagcaatgagtaaagctgtaatggtaagttttttagttttcatctttgaatattcccttctgtttatgagtcgtgatgtgctttttcattatgattatttaaactttgttccatagtagaaaccatcaattgcaacaactcatttgcttcaaattgcgctgaccgaaattcttcaacaataggtaatgcattgatttctttttcaagttgagaaatttcttcttcagatttttgataagcctgatgcttgccataattttgaaaatttactgactgtttttgttgcaattttaattgtttcattttttgttcaattgatgtattctcatgaatttgttgctctacattttgatattgtttaatcaattctagtgcctttattttgttcgatacactatttgcttgctttagaatatcttctttttcatacatattaattagtcaccataacttgattatgaaaatgtaaaaattcaccatttagtgagtattgttttgcttctttaactttaacatcaacaagttgaccaatagcttcacgaggtcctttaaagttaactaatttatttttttcagtataacctgctagaactgtttcatcttttttacttgttccttcacataaaacagtaacaacttgtccttcataattttgcattgctttttctgaatattgaccaacttttttatttaaacgttgcaagcgatcttttttcacttcagttggaacattatctttcattttagcagcaggcgtaccgtctctttgtgaatacaaatacgtataagcatgttcaaattgaacttcatcgtataatgaaagtgtttcttcaaattgttcttctgtttcgttaggatatcctactattatgtcagtagtaagagcgacattaggaatagcttctttaattctatcaactaaatccaagtaactttcacgtgaatatttacgtcccattatttttaatacagcattatttccagattgcacaggtaaatgaatgtgaggaacgatatttccaccttttgcaatcacttcaatcattctatctgtaaaatcccaaggatgactcgttgtaaaacgtacacgtggaatgtcaattttagaaatatcctctaataaatcacctaagccataatctaaatctttaatatcttttccatatgaattaacattttgtcctagaagtgtaatttctttataaccttcacgagcgagttctcgaacttcttcaatgatatcttgtggtctacgactgcgttcttttcctcgtgtaaaaggtacaatacagtatgtacagaatttatcacatccatacataatattaacccatgcttttgtacttccttcacgcactttaggtaggttttcaataacgtcgccttctttagaccaaacctcaacgaccatggcttttgataaatatgcttcttctaaaatttcaggtaatttatgtatgttatgcgttccaaaaatcatatccacattttgatatgattttaaaattttatttacaacggattcttcttgtgacatacaaccgcatacaccaattaacgtttcaggtctatttttctttaaatgttttaaattacctatttcactaaatactttattttcagcattttcacgaatagcacatgtattaattaatataacgtccgcttcattaatatcatcagttgcttgatagtctaaagcttgcaaaattcctgccattacttcagtatcatgtgcattcatttgacacccatatgttttaattaaaaatgttcgtccttttcccatacctttatatttatcttcaatatgaaaatctcgattatattgaacatcttgtttaccacgtttttttgcttctttaagattaggtggttgataaacatgttcgaaatatttactatagtctttttctgcttttttattacgttcgtctaaaatatctatcgtaccagcttttctttgctcttcgttcactttacaaaaatcctttctatatgccctaatattattagtacattatattaaaattagcattaaagtgcaaaaagaggttaaaaattaatatattttattattaaatattgaataaaaagtggaatagatgtcatattgaatcttactccactttaactaaacgttatttaactttaaaatatgttatgcttcgtcatatttaccagttagagtttcaatagatataccttctggcacatgataaaacttcacttggctaataatactaggacattctaattcaaccattctttcattcaatttttgaattaaaattaagcattcactcatatcaccttggacagtcgtttcaagaggacctactctgtaatgtagtcccgactgatcaataattttaatcgcttcatctacataaggaataacatcatcattattaggtgttttaggaactatttgtacactcattaacgtatcttgcataaatttcacctctatgatttatttatgattttattttatcatgattatctttataaatctgagttattctatattttctattgcagattttatagcttttgcaaagtcgcacattaatttatcccaatttgactgattttctctactatttcgatttgttttattatttttgaaaaaagttttacgtaatgaggtagttaactcaatttgtacgcccatacctctagtcgtacaattaacaatattattatcctgttgacctgaaatatggcttggtgcttcacttgcttttataccaatattatttaattgttctttgatgagtgattttagacgttcgtctttcccaccaacataagcaatgctctcgttcccttcacaaccatgaatagcaatagcttggttactttcagttaccaaattcattgcatctttattatcataacgtgtagaagttacgtgcaactctttatttcctttactacgtaaaccttcgaaagtaaagtaattatatccgccttcatcagcaattatacttgctaattcagttgtagcgggttcaatgcctccaccatgaattgctagtattgaaacgctgctatttcggtttttagttattattttccagtcttcattttcaatcgtttctttttccaattcttgcattgatttaaatttatccaacatttccactccttttatttactatattattttcttccctaataaaaataaataaatgaagtttaacaagatttttataaatttaaacttaaattaaaagacattcttgaagtcatatgatgctttcaagaatgtctttaaaaaaattatacaaattgagcagttaagtcattaaactcttgctcagaaatatggatatctcttttagttaatgcactttcatctaattcttcaatttgtgattcatatgaaggtgttgttgtgtcttgatatacaatacctttaactagtgattcatgttctaatacagttttcatcgctaattgtttatctgttggatcataattttcaatatcttcaatactagttaagtgttctttaaaccaatcatacgtattcactttattatatgtcacacatggagaaaacacatttacaaatgaaaaaccatcatgattaattgcatcttcaattaattttgtcaatgctttaatatcacttgaaaaaccttgtgctacaaatgtagcacctgatgatagtgctagttctaatggcgcaacatttttttctatatttcctttaggtgttgatttagttacaaatccaacagcagaagatggagacgtttgacctttagttaggccataaatttggttatccataacaatataagtaatattcatattgcggcgtaatgcatgaattgtatgacccatgccaatagcataaccatcaccgtcgccacctgaagcaatgactgttaaatctttattagccattttcactccttgggcaagaggtaatgcacgcccatgaataccatgtaccccataagagttaatatagcctgataaacgacctgaacaacctattcccgtaattaatgccacttcttcaggttctaaacctaaatttgctgctgctttttgaattgcagcttgtactgaaaagtctccacatcctgggcaccagtttggcttcacactgtttctaaaatctttaaatgtagccaattacatcatctccttcatatctttagctactgaaagtcctttttcttctatttcatgtggtaaaaaaggtgtaccatcatatttagtttgattaactaatttgtcttgaatggcagtattcatttttaagatatttgataattggccttgatagttatgctcagctactatgacgcttgaagctttatcaatagcttgttgaataatatcttttggtaatgggtgaagttgacgaatttgcatcgtattaactttaataccattattatttaatcgtttacttccttcttcaattgcacctttacttgaaataaatccgatatataaaatatctgctttctcatgtttctcatcataatcaacaggtgtttcaataagtaaattcgcagttttactcatacgtttttccatttgttcacgtctgttatcagcagcttcacttggcttgccttcttgattatgttcaacaccagtaacatggtgaataccacctttaacaccaggaattggacgttgtgaaattccagatgttgtaagtgcataacgtttaaagtatgatttatcatcttcatcacgttcaatatctgattgaataagctctccacgtttaatttgaattctattgtaatcgagttgttttactgtttgtttacctaatgacaattgcaaatcgcttaatacgataaccggacattgatattcttcagctaaattaaaagcttccatagttaaataaaaagcatcttcagcatcagttggtgctactactatcttaggaatatctccatgtgttccatatatcatttgcattaaatctgattgttcttgttttgtaggtaatccagttgaaggacctccacgttgcgtgttaacaataactagtggtgtttcagtcatacctgataaaccaatggcttccatcattaaagataaacctggccctgcactcgcagtaaatgctctaactcctgcatagttcgcaccaattgccatattcgctgcagcaatttcatcttcagtttgtactacagtacctcctacttttggaacatttgcaatcatatactccataatttctgaagcgggcgtaattggataagctgccataaatcttgaaccagctgaaatcgcgcctaatccaattgcatcgttaccaatcatgtataaatgtggtgtgccctcactatcttctagtaaaaaatcaccatttactgtatctaatttatccttcatcaactcataaccctgatgaagcgcttctatattcatttcaacaactttttgaccttttttagtaaacatatttgtaattaacgtttcgaaaggtgttgtatctaatttcattactgcacaagttgcaccaatcgctaccatatttttcatcagtgcagtacctaattctttagctgttaatgttaacggtaattcaataagttgcgcacgacaatcatctggtttagaaggtttagctttagcatctgcaataataatactatcttctctcatttcatgatgatttaattcaattgtctcttgatcaaatgcaactaaaatatctaaatcatcactaattgcatgaattggagaagttgagactcttattttattatttgtatgaccgcctttaattcggcttgagaaatgtcgatatccatataaataataaccttttcgattcattgcagtagcaaatagttctcctgttgactcaataccttcaccttgttgtccgcccactttccatgatatttgtggtttcatatcattagcctcctgtggaattaattcatactaaatcataacaaaaataaccaccgtcttactatgtcaacagtggcttttatttaaattcatactaatggactatacgctatttatcaaaaggatgatcctcattgattaaaatgcgttctatgagtttggttcttccatttttatctaaatctataataacacctgaaagtacacttctaccattatcaggcactacatgtcgttgtggcaaacttgtaataaaacgcttaataacttcctcgcgattaatccctagtattccatcataataaccagtcatacctacatctgtaatatagcctgtaccattgggcaaaatacgctcatcagatgtttgaatatgagtatgtgtgcctacaatagcactgactcttccatctaaataccaacccattgcatttttttctgaagtagtttctgcatgaaaatctacaaaaatataattagtttcttttttagcttcttcaatcaattgatctgcttttttaaaaggatcatcaatatcttgcataaatgaacgtccttgcaagttaatgatggcaactttaatatcattaacctgaataaaacgcatgccaacacctggcgcttcactcggaaaattagcaggtcttatcattcttttagcatcatcaataaagtcataaatctctctttgaccataagtatgattccccattgtcataaaatccacgccatctctaagcaattgtttatataatttttcagttaaaccttttccatgagcagcattttctgcattaacaatgctcaacgtaggcttataagcttgctttaatttaggcaaatattcagcaatggcatttctacctacttttcctacgatatctccaataaataaaattcgcattaatgttcatcctctcacaatatagtgtaattgaaataactatataattaaaggtagagtttcatattttttaaaattacacagtcttaactttagcatgcatacagcatatgttattataatattataaaaatttaggagttgtataattagatgtcaattaatatcgatccagaaaaatttgcagaactagttgtaaaagcaaacccatcaaaatcagaagatgcagaagatatggctaaagaaagcttagaattatatattaacgcataccgtttagcagaaagatattctaatattgctacaaattgttatgatacagctgaaattctttctgaaatcaaaaaaacagatttacaacttaaataatgaaaaaacctgagacattttaaatatgtctcaggttttttagtaatcagtgagttcctatttaatttttaaaattacttcgcatactctactgctctagtctctctaacaactgtcactttaatatgtcctggatattgtaattcttcttcaatttgattttttatatctctagctaatcggtaagattttaaatcatctatttcttcaggagaaacaataactctaatctctctaccagcttgaattgcgaacgctttttcaacaccttcataactttctgaaagagtttctaagcgttctaatctacgaatataattttcaagtgtttctttacgtgctcctggacgtgcggccgataatgcatctgcagctgctactagaattgaaataatagatgttggttcaacatctccatgatgtgaatgaatcgcattaattacagtttcaacttcaccatattttttagctaattcaacaccaatttcaacatggctaccttcaacttcatgatcaattgctttacctacatcatgtagtaatccagctctttttgctaaactaacatcctcgcctaattcagcagctaacattccagaaagatgtgcgacttccatagaatgttttaagacattttggccgtaacttgttctatagtttaaacgacctaaaattttcactaaatctggatgcatattgtgaacattgatttcaaatgttgcttgttcacctgcatccctaatgatgtcatctacttcttttctagctttgtctaccatttcttcgatacgacctggatgaattcttccatcagagactaaattcactaatgcagtcctagcgatttcacgtctaataggatcaaatcctgataaaatcactgcttcaggagtatcatcaataatcaagtcgatacctgttaacgtttctaaagtacgaatatttctaccttctctaccaataattcgacctttcatctcatcatttggtaaattaactactgaaacagtagattccgttgtatgatcagcagctaatctttgtacagtagtagctaacaattcttttgctgttttgttaactttttcttttgcttctctttccttttccttaacaagtactgcaatatcttgtgacagttcttcttccactctatgaagttgttcattaactgcttcctcttgagtgagaccggagatgcgttctaattcttgttcatgcttcattattaacgtctgaacactactctcttttgcatctacttgttgttgtctttcttcaattttggattctttttgatctaaaatctcatcttttttatccaataattctgatttacgatctaaattttcctctttttgaagatttcgggcttcttgtctttgaagctcactacgtctttcacgtagctctgtttcaacttgttctctaataatttgattttcttcttttgcctctaataatttctcttttttgatattatctgcttctttttgtccttgtttgataatatcattagcagtttgtctagcttgaatttgcttttgatgtaatatatttcgggctaaaaaataccctacaacaacccctagaataatccccagcaaaatgagtaggaggtctaataaattcacataaacacctcctttttctaggtatttgcttgtatattaaaatctctatgattttttataaattgtataaataatatacatattaattgtacgtttaggtactcagtagtgtcaagatatgaaatttcactacacctacttataaaagaaagagagtgacattgaattcatttcgaactcattattcactctcacacaaaataattttaatatttttaaatatatattaaaagtatattctatttaaagcattaaaaattcaacattattcttcatcgaataatgtttgtgatgatttatcttcattttcttcaacatcaccatcgaaaatgcctaatttttcacgtaatttgcgatcgatttcatctttaatttgagggttttctttaagatatgttttaacattttccttaccttgacccattctctcaccattatatgagtaccaagcgccagatttatcgacaatatcattttctacacctaagtcaattaattctccctcttttgaaataccttgaccatacatgatatctacttcagcaattctaaatggtggtgctactttatttttaacaactttaattttagttctgttacctacaatgtcttgaccttgttttaattgttctgcacgacgcacttctaaacgtactgaactatagaattttaaggctctaccacctggtgtagtttctgggttaccaaacattactccaactttttcacgaatttggttaataaatatagcagtagtatttgattttgaaattgcacctgaaagtttacgtaaagcctgagacattaaacgtgcttgaagaccaacatgtgtatctcccatttcaccttcaatttcagctttaggagtcaaagcagcaactgagtctacaacaacaatgtcaacagctccacttcttacgaaagcttctgctatctctaaaccttgctcaccatggtcaggttgagaaagatataaattatctatatcaacacctaatgcttcagcatatactggatcaagtgcatgttcagcatcgataaacgcagcaacgcctccatttttttgcacttcggcaatagcatgaagtgctactgttgttttaccggaactttcaggaccatatatttcaataattcttcctttaggataaccacctacacctagtgcattatctaaagtaactgaaccacttgatacactagatacacgacgacctttattatcgcctaatttcattactgcacctttaccaaaggatttttccatattttttataactgtatctaaagctttttgacgatcattatccaaagcgaaacctcctatatgagatagttatctatttaatattatatatatattatactcttaactatattcaaacacaagcgttttgcgaatatttgttcgcataaaaagagaacgctatccgaaaaatcgaacaaatgtgccctgaaattataactattttttaatttaagtacattttagtgccaatttaataatcttattaatacataattttgacttctgttgggcagtatatttcttgattgcgttatcttaaatgtagtcattttaaaatcatcttttgtattaattgctagataaacattctctttctcatgtaatattgctatacccatttcagttttatataaatcttttacatatgatgcagcgtctcttaattgcatttcaatacttgaatgatgatttaaaaatatgtcattatctggtaatattccttttaatatattttgtttatcaaagcgttttaaacgagtataaatcgctccatcagttactccgtcatatatacttactgtagaattcatttgttccattacagattgttctaacaatgtgtcatctgaaccataataaaattgaccaattcgttctagaatttcttcttttataggttgaatcaatgttttacattcgctttgtgtagaagcatttgctgttaatctaatatatacttcatgtttccctgctaacggagctatcgtaggattcgtttgtttttcaattaaatccataagttctgtttcaactttcgattctccaattcctgcaaatctaagttgctctgaaaaaatagtattgtcattatctataagtaatggaagcaactcatttttagccataggttgcatttcactcggaggaccaggtaacagaattacttttttatcattcatttcaataaacatgtctggagccataccataatgattttttaacactttcgctccctctatcacaagtgcttgttgtttattattaggtgtcatttcttgcccttgttctttgaaaaaaccttcaatataatttaatgcttcttcattagtcactaagtttttatttaatacttttgctactgtttgtttagttaaatcgtctttagttggacccaatccacccgtgagcactagtgtgtcaaatctttttagtccttctctaataataaattctaaacgatcaggattatcaccaataactgtatgttcaactatattctttccaatttgattgaaaagttttgataaatattggccatttgtatttgctatttggcctaataataattctgaacctactgctatgatagatgtattcatatgcccctctcccttatttagtcttaattcatattttatacttaatctattatataatctaaaaaataactcaaaaaaatgagagtcattttatgcgactctcattacatttcactttatttgattatactttttattgcttaaacacatctctacctttatagaaatattcaattcctgataatattgtaaagaatacgccaatatataataatacttgtcctaattgaaatccaatccaatttgagaataaatcaccaagtaaaatccaaataattgctaccattgtaacagctgttttaattttacctaattggcctgctgcactcacaaacccttgttcaatttgaagtaaacgtaaacctgtaaccgcaaactcacgagcaatgataattattgctacaactgaattagttagccctaattgaaccataacaataagagcactagaaactaataatttatccgctaatggatctaaaaacttacccatatttgtcacaagttgccattttcttgctaaataaccatctaaaaaatcacttaaagaagctacaataaaaataatagcagcaataagttgctctattcttatgtcatagccacctaatacagatacatttccaaaaccaaagtttactagagcaaataatataaatactggaatcaaaatcactctaaaaactgtaatctggttaggtatattcattttaatacctcatttcttaatttatatgtaaattatattaataatactgctaacacccatataattaaagtaataattataacaatactaatcataatcaataattgaataggttctttatttttagtacgatattcgggcacttcgttgtgtcgataatgatgtaaaagtgtatcgagttgattgtggtgattaggaatttcttcatgatgcactttaatgagttgatttacatccatattaactacacttgcataacgtctaataaatccttcagcgtaatccactttggcaagttgatcaaatttattctcttcaatatattttaacgtttctcgctttaattgtgtacgttgttctaattctgttaatgtcattcctaatctttctcttctaccttttaaggtttcaccaattgttttcacgtttgacgcctccacccttattactcaaaaaaaccgaagccaccgccaaacacatcttctccaaaatctaatgtgtttttgcttttaattgcttgttgtttaacttgttgtttcatatgatcatattcaattttttgattctcatgttcacgtagctcgataatataatcaaaatcatcgatgctatattgatttgtttctataaataaatctggatgctcaactacttttattgatggtaaagtcatcacttcttccactaactgttgatgtttaggatttgtttctctagcagttactgcaccatcaataatataaacatgattagcatcatattcaccttttataagagaactacgaactgtctgtttaattaatgttgaacttataaatagccatcgtttatgcgcacagacactacctgcaacaatcgattctgtttttccaacacgaggcatccctctaatacctattaatttatgaccatcttctttaaataactctgctaaaaagtcgacaagtaaacctaaatcttcacgttcaaaacgaaatgtttttttgtcacctgcatcttgttcaatatagcgaccatgacgcactgctaaacgatcacgtaactctggaattcttaactttgttatttctatttctttcaattcatgaataatattttcaaaacgtgtgactttttcaagactatctgtcttaataagtaatccacgacgcccttgatcaacaccatttatagtaataatactaattcctaacataccaagtaaactcgatacgtctcctaaaagtccagctcgattaacaattatctcgtattctaaataccattccttttttttagcgacagtcatctaaccaccccttgtttaaatacaatttgaaatattccccttatataattaaatttattatatcattgattataaaaaacgaatcgtcaaatctgcatttaaaatttaggatactttttaaatataccaaccaccattaaccttttggactgttcctgtaatactcttagcattaggatggcataaataagcgcacacgtgtgctacttcttgtggagctatcattctttgttgtggtagttcagataagataactgctttgtcttcatcactgaatgctttagccatacgtcctgaaacaaaaccaggtgctatagcattcacagtgacattcgtcaatgctagctcttgactgagggcctttacaaatccaatttgagcacttttcattgctgaataaatagtttccatacttgctcccgtctcgccccaaattgatgagataacaataattctaccatttgtactttttctcaatatgtctatgaaatatcgacagcatcgaattaactgtttaacatgaatatgataacattcatctatctctttatctttcatatcttgtaacatcccatataatgatgtaccactactataaattaaacagtctaaatgttttatatgactaaatatatcattaaaatcaatatcatgagtcaaatccatttgaataaattctacggcttcacctttatactttttttctaaggatgagatatcagattgataatattgaagtattacttcatatctatcttttaataaacgatctacaatcgcactaccaatactacctgaaccaccaaatactaatgctttcatatttaatctatctccaaacggctatcaacaagacggtcaatatttagatattgtttggcagtttcattaatactatctaaagtgatattctctacaatatctaacatatcaaatacacttacgccctcaaaatacaattttgcatattgatttgcaatatattctggggaattcaaactagagataaattcaccaataaactgcttcttcaataattcaaacgcttctgaatcttttaagtttcctctatatttctttaattcagtaagtaatctatcctttaattgatctggtttatgagtagcacttgtaataattgagaaactataagtaggttcaagaacaaattgatatccaaatgaatcatcaattaaatcatcattaagaagagattgatagaaatctgtttcttcaccgaatacgagttcaaaaaataaagtcatttctaaatctttttgaacatatttctcaggtgcttcattcaaaggttcatttttaaatcctaacattaaacgtggagactgtaatttcattttttcagatacaaatgattgaactacttcatttggttcttttattgctcctctttggatagaaggttgatttgttttatgacgacgattttcatgttcttcaataacattacaaatacgtttaggatccacatctcctacgacaaataacaccatattagatggatgataaaacgtttcataacataagtataaatcatctttagtaatactataaatactctcaacactacctgcaatatctactttaattggatgatgatgatacattgcgcgtaatgtattgaacataattttatatcctggttgttcttgatacattttaatttcttcagcaataattcctttttctttatctactgtttcttttgaaaaatagggtgtttctaccatatcaagtaaacgtagaatattacgttcaacttgatcagttgcactaaacaaataactcgtacgatcaaaacttgtaaatgcattgacttgagcattatcattggcaaatgcagtaaataaatctttatcatcgtctttttcaaataacttatgctctaaaaaatgtgctactccatctggtacagtcacatattgatctttatgatgaggtttaaatgtattatccaacgaaccaaattgagttgtataggtcacatatgttttttgaaatccttttttaggaattacaaataagcgtaatccattatttagttcatgtttatagacgcgttcatcaattaattcataatattgttcttgcactatgattgacctcctttcgttaatacatatatcgtatctaaataggcttggtttgccattttaacgacatcttctttagtcactttattaattaactccatgtattctttatctgattgaggctgattcaaaagtagttgattttgcataacttcaataatacctttaggtctatctgcaatttcttgtcgttgtgaaatgataatttttttagctaatgctaatttttcttcagagaattcccctactttaaacttctcgaattcttcaataattgtgttttttgcagtatcgtatttttcaacagatacaccacttaatacaaataaatagccattttttccatctaattgtgaatgaatagaataagctagactttgtttttcacgtacttcattaaatagtactgaagaaggatcaccgccaaacatagtatttaatacgacaagtgcatagtaatcttcattcccataatgagttggaaaacgataacctaaatttaatttagcttggtcgacggtatctttttcaatgattgtttcagtagattgggcgttacagtcagtatttacattatgattaaagtcaaacgtagttgagctaagactaaatgaattttctataagtgatgtaccttcttttttatttacatttcccactacataaactgaacacatgtcattatttatcatagatttatatgtatcatacaaactttcatttgtaatacgcgcaatattttctatttgacctatagccaaataacgataagcttcacttttgaacatatattttaataaattaataaatgaatattgcgctttattgtcaatcatcgcttctatttttttatgtaataatgatttttcttgagtaacaaatgtagagttgaatgaattgttctcaacaagtggattcatgatgacttcttttaataaatttaaacctttttcaaataatggtgtagtatctttaagataacgttcatttacaatttctaaagaaatagtaatgacatgtttatctttaaatttagaaacaaagctattaatataagccccataaagctctgataattgttgattaaatgatctatctgttggccatttttttgtggcacgaaccaatactttacttagtaatgaacgagcagtaattgtttcgtaatcaagtggtgccataaatttaaatgtgatcatcgttgttttaaatttctcagtcggaagaatatcaatatgtatttgatgattagtatgttgtttcaaaataatcaatcactcctttacctgttattaaatttttgtgcgtgttaatttaaacttcactaggctactttttatataatttaatgaatataaaataggtttacccatttcatcataatgtacaacctttaataacattaatccctcatgtggttcagcattcaatatgctagaaatatgaggttcataactgattgcttcaatttcagtttcagcagaagctaccttatgaccagtattaagttcaattgcattaagcatcgaaccatcactttcttgatattcggtacaagttaaatgatgctcagcaatcttatctaaacaataaataactggttgatgattcgcagtacgtagtctttcaataattgttataggttgtttatcttcaatatctaacatttttgcatccaataaagaagcgggttgttgctctaaacttaaatattctgtacttgcttcatatcccgcttttttaatcatttcactaatactaaataatttatttaaaggataataaaagggacgtagagcctttatacttgttccttcctcaaaattatcagttaaaacttgttcaataataagttctccaatcgcttcatagacatcatctgttttaacgttaacttctctagcaatagataaattgctaggaagtttatcaccaggtttcaaagaatgattttttatttttttaaaaatatattcttttactttaaaaaccgagtttaattcagtcatactcacacctcttcattctcaaaatctattaaaacttgtcttggtttactgcctttttgtggaccaataacattatttctctctaaatcgtccattaatcttgaagcacgattatatccaattctgaattgtctttgtaaaagcgacgtacttgctttttgtttctcaattacaaaagcgtatgcgtcatcatatagtgtatcttcacttttcatttctgatttttctacaggggcgtcaggttccatttcttttacgtaatttgctttttgttgttcaactacataatttacaacttcttgtacttcttgatcacttaaaaatgcaccttgaacacgtgtctgtgtagattcaccattaccaacataaagcatgtcacctttacctaataatttctctgctcctccagagcctatgattgttctagaatctgtttgtgaacttacagcaaatgcaatccttgaaggaatattatttttaataatacccgtgataacatctacagaaggacgttgtgttgctacaattaaatgtatgcccgctgcacgagccatttgtgtaatacgctgtattgcattttcaacttcttttcctgctaccatcattaaatctgctaattcatcaacaatgacaacgatataaggaagttctgattgcttttcatcaagttcttcattttgacgtcttataaattgattgtatccttcaatgtttctagtagacgaatgttgaaataaatcgtaacgacgttccatttcagcaacaattttctctaatgcctgtgatgctttatgaggatttgttactacaggtattaataaatgtggaactccattatatacatttaattctaccattttaggatcaattaacattaattttacctcgtgtggcttagcatttaataaaatgctcgtaataataccgttaatacatactgacttaccactacctgtagaaccagccactaataagtgaggtgtttcattcaattcaatagtcattggttctccggaaatgtctcgtcctaaaccgacttctaatttattttttgctggaaacttagattctaaaacttcttttagcgtaactaaagaaattttatcatttggaacctcaatacctacagctgaacgtccaggtataggcgcttcaatacgaatgtctttcgcagcaagtgctaaagctatatcattatgtaaattaacgattttatttactttaacaccttgagcgggttgaacttcatattgagtgacagccggtccaattttaatttgagtcactttagcattaactccaaaatttttcatggttgattctaatatttgacctttacgttgtacttcagctcttgaagttgtcgtttgttttgttggctgtttaagtaatgataaaggaggaatgtgataggctacattgccaacttctcccgcttctatgattgaactattattcgtatcgttgtcattagagacgtgttttattttatcttttttcatagaatttgatgaagatacatgagtaggttctttatcttgatggtctatgtcaaattgacgttttttacgtttaggtcgtactttttcttcttccgttgctgcatgatgactatatataggaatatctttatgttgttgtttcacttctgggaaatcactcacatctttaatgacttcatctttcctttgttgttcttctaattctctttgatgtgccaatgcttgacgctgttcttctttttcacgtaatcgttcttctcttctaattttatttgcttctcttttttcttttagagtagatgaagcactctgagtagaacgtttaaaataatcaattgtgcttctcgccacatctctatgatgtaattttagtaataagataaaacttgatatcagtaaaatcaaagtcacaatgataatcccagcaatagagattaaaggtacaaataattttaataaataaaaacctataatacctccaccgaaatttggaaaatgagtatgttcataagatttatagacgtaagacaataccggttctcttttcgcaacttctcctttagaaaaataataaatgagttgagaaacaatcagtaatacaaattgtaataaaatgagaccgaacgtacgacgagtttttggaaaatgtctttgcattgcaatataaatcgtaattaaacttactaaaatatatgtaaggtaacgacttgcgccaaataaataattgaaaaagctatcaatcattctaccaacaagccctaattgaaatattcctaaaatagatataatcacaattataatagtaataatataccttatagaactatctgttttttgttgctttttctttttagattggcgtgctttcgttttcgtctttgaattggtttttctagtcgttgtttttttcttagttcgtggcaaatgttacaccttcttttatttttaattataataatgacattttcaaaaatataaaaaaatgtaagttatgttttagagttaaaagtatgaaagaggttgagacaatatatatcacatagactcttaagcccattttaaaatcattaaaaataaatgagtcaaatcatcttttaaatttatagagttcactataaaagttagggtaaatgtcttatcttttatatactttcaatttaatacatcaatgaatctataaataagaatgataaacgtttatatttttaattattttataaaagtgatattgtcccgacctctttattaaatgtatgtctcttaaatttcagaaataactggaataatcattgggcgacgttttgtactttcaaataaaagcttgctaatttggtcgcgcatattttgtttaatttcagaccactcaatgcgtttttcttgtagtccagcttccacaatttctcgaactttatcttccgcttctttcattaattcttcactttcacgtacgtaaacgaatccgcgtgattgaatttcaggtccagcagctatacgtctatttttagggtctaatgttactactgcaataaagataccatcttctgcaagaagatgacgatctcttaacacaatatttccaacgtctcctacacctataccatcgataagaatattacctgaatttactttttcatttaataccatgtgtgagccatcaaaatgaatcacatcacctttttcgacaaggaaaatcttttcaggtgcaacacctgcttcatttgctaattttgcatgagcaatttgcattttaaattcaccttgaacaggaataaagtattcaggtttcataatattaatcatcatttttaattcttccatacaaccatgactagaggcatgaatttttttattatttggaataatatgtgcacctgctcgaacaagttcatttaacgtattggctataataacttccatatttgctgaagcagtgatggctaagtaaactgaatcgccctcttcaatatttaaaattttatgtttatgttgggccatttgacttaacgcttcaataggttcgccttccatacctgttgctataataacgacttcatttttaggataattttcaacttcattgattggaagcaataaatctttaggaatatcaaaatatcccatttttcgtgcagtattaaatgaactttcaagagattttcctaagaaagatactttacgatttaatttactagcaacatttaatacttgttgaattctaataaaattcgatgcatagcatgaaacaattaagcgtccttttactttagcaaatgcatcataaatatgcgattctatgacattttctggagtattataaccaggtttttctgcttcagttgaatcactaatcaaagcaaaaacaccttcttctccgatttcagccatgcgtttcatatcaggagcataatgcccttgtaaactttggtcaaatttaaattcacctgtatatacaattgaaccgtatgaagtatgaatacagatacctaaactatctggaatactatgtgatgtattaaagaaagtaatattgacgtttttaaatctcatcactgaatcatgattcacagtataatatcgtacttttttctttatatttctttttttgatactttctttaactaaagctaaagtaagttttgatccataaattggtgcatcaacttgctctaaaatataactcactgcaccaattgcatgttcatggccatggcttaaaaatatcccttttaatttatctttgttttctactacatattggatgtcaggaataacaatatctactcctaacatctcatcttcaggaaacattaatcccgcatctaacataaacatctcatcgtctacttcgacgatatacatatttttagcgatttcgcctacgcccccaagtggaataatgcgaatatcgtcattctttttctttactaaactcaaaatgttacctcctataattaattcccgtccatataaactcataatttattataatttaatttacgaaggatgtacactattaaagtgtgttgtaactaaggagtaaaagacctttaataaaaaatatatactttcataaaaccattctttatatatataaagaaggttaggacttcattttgtcctaaccttaccttaacttcatccatttattcatctaaaactttatgagacgcatttacacggccttgtttatcaatttctgtaattttaacttcaatcgtatcactgatttttaaaacgtcttcaactttatttattctatctttagaaatttgagaaatgtgtaataaagcatctttacctgggaataattctacaaaagcaccatatttttcaatacgcttaacttttgcatgatatacttgacccacttcagcttcgcgtgtaatttcattaataatttctcgagctctatttatcatttcttgatcaacagcgccaataaagatagtaccatcttgttcaatatctaacttaacgccagtttcgtcaataatttcattaatttttttaccacccggaccaatgacatcacgaattttttcaggtttgatatgcataatttctaccttaggtgcatatgcacttaattcactacgtggttgatcgattgtttgtaacatatgatccataatagctaaacgaccttgacgagcttgttcaagagcttcttcaatcacttcacgtgttaaaccatcaattttgatatccatttgaatcgcagtaataccctctttagttccagcaactttgaagtccatatcacctaaggcatcttccataccttgaatatcagttaaaattgtataactgtcttcacgagtgacaagacccatagcaataccggctactggagctttaataggtacaccagcatccattaacgctaatgttgatccacaaattgaagcttgtgaagatgagccatttgactctaatacttcactcacaatacgaattgtgtaaggaaactctgtagtgtcaggaatgatatatctaagtgctctttcacctagtgcaccgtgaccaatttcacgacgacctggcgctcttactggacccgtttcacctactgagaaattaggaaaattatagtggtgcataaaacgtttttcaatttcaggtcctaatccatcaataagttgatagtctcctaatgctcctaaagtaagtacagataatgcttgagtttgtccacgggtaaacaatccagaaccatgtgcacgtggtaataaaccaacttctgattcaagcggacgaatttcatctggtttacgtccatcaggtctaattttttcatctgcaattaatcgacgaacttcttcttttactaaatcatttaagattgcatatacttcatcgataagcaactcattttctgggtccgcttcgtctacaaattcagtagcgatttctgctttaagtgcatctaaattttcatcacgttgttgtttgtcaaatgttaatacagtttcttttaatcctttttcttccgttaaagattttactcgttgtactaattcttcatcacgttcaacgggaataaattctttttttacaggttgaatatgctcaacaacttcttcttggaaagcaactaagcgttttatctcttcatgaccaaagaaaatcgcttcaagcatttcttgttctgtaatttcactcgcacctgcttcaaccatatttacagcatctttatgaccagcaacttctaaatctaaacgagatacttctttttgttcaagtgttggattaatcacgtatgttccatcaatatatcctacattaacaccggcaattggtccttggaatggaatatcagacacgctcaatgccattgacgatccaatcattgctgccatttctggggagcagtctgggtccgcacttaatacagtattcataatttgaacgtcatgtcgataacctttagggaataatggtctaattggtctatcaattaaacgtgcagtaagtgtcgcttcatctccaggacgaccttcgcgttttttaaatccacctggaattttaccagccgcatacattttttcttcatagttaactgttaaggggaaaaaatcaccatcacgtggctctttagaagcaactgctgtagataatacaacagtatcaccataacgtactaaaactgcaccattagcttgtttcgctaattgacctgtctcaatcgttaacgatcttccagcccattcggttttgaacactttcttttcttgagacattatgaatctcctctctgaaatctaatacttacatcatatcatttatttatatatttttatattagtgtttatgataaaaatacaaaaaaggaaagtaccaatctaaatggtgctttcccttcaatatatttaaaattaacgacgaatacctaatgatttaattaattcacggtaacgttgaatatctttactacgtaagtagtttaataaatgtctacgacgaccaaccatttttaataatccacggcgtgaatggtgatcttttttgtgttcacgtaagtgttcatttaatgcagtgatttctgcagttaaaacagcgatttgtacttctggtgaaccagtatctgtttcgtgtacacgatattctttaataatttcatttttacgttcttgagtaatagccataattaaattcctcctaatttttgtttacaccttaatctgagcaaggcgtcggagtttcaacctgccaagataaaggattcaatagtaataagtttttcaaaaactcaactttaaatattatacgatacatcatcaccaaaatcaactgctaaaagatattttgcacgttctttatcatcattcatttgactgactaaagcatctataccatcaaattttacctctggtcttaaataatggtgccaatatacgattacacgttctccataaatattttcttcaaaatcaaaaatattcacctctatcaccacttctgctttagatggatcgtggaatgtcggcttaacacctacgttagctaccccacgatatattttgtgttcggcacctatttcaatacttaccgcatataccccttttttaggaagtacataatcatcgctaggttggacattagctgttggaaaaccgattgttcgacctcttttttctccttgaacaactgtacctttaattcgatataaataacctaattcatcattagctttttgtagattgccttcatgtaacgcttgtctaattgatgttgttgaaattttttcagaatctaaatctaatttaccgactattgtagtattaaattcatctatttcatttaacacggccatatttcctttaccaaatttaccaaatgtaaaatcaaatcctgcaacaacttctttaacatgattattaataatatagtctttgataaactcttcagctgtgacgttagcaaaacgtgatgagaaattgataacaatacaataatcaatatcatgctgttctatcatttctaatttatcagatagtggcgttaagtaatctgtacgtttacgttcaggatttaatactactgatggatgcggatcaaatgttgttactgccttttttaaatttttttcttttgcacgtatatctaatgcttcaaatactttactgtgaccacgatgcataccgtcaaaaaaaccaaatgccattgcaacatcttcttttatgagttgttcattttgtattggatgtgttatttctatcactttcatatcaatcaaaggctcctttaattaaatacttttttaggctttatttcgttaattttgtcaggatgatgttcataaatggctaatgctttttcacttatcttatcaataaacacaaattgcttttctaatgatagagtaaaatctttttttaggagtttttgaccatttaagattctatactttaaagtgtcatcatcaatgactacatgttgtaaacttttcaaaccatattctataggaaatagataatgttgtaatgtttcatgctcatgtaattcagaaattttttcaagtgataaactctcatttatattaaatccacccgaatttatacgagttaacaacgacatatgagcaggataacctaaagctttgccaatatctgttgctaacgttctgatataggtaccttttccacacgttacttttatatcaaaatgacatgtttgttctataaatgttaaatcagatattcgttcaatttcatcaattttaacttgtcgttttggccgttcaatagtttctccttttctagcatattcatataatttttttccatttacttttacagaggaatacattggaggaatctgctctattactcctttaaattcttctaaaacacgatcaacttctatagaagtaatcgtattcgccgctatatttactttttctattacttctccagtttgatcttcagttgtcgtactttcacctaatgtaatggttgcttcataagatttccccatatccatgacatagtcgctcactcttgttgctgtccctatacagataggtagtacacctgaaacttcaggatctaatgttccagtatgacctatctttttagtttttaagatttttctaagtttaaatacaacatcatgactggttaaaccacgctctttatacactggtaatataccgttgtacattttttcacaccctttagtttattatgtctcactatgtattattaaatcatctaatgtcttatccatgttttatcagtattaatcatataaaaaggagtaggactgaattcatgtaaatgttatcgtcctacccccattatatgttacatctaaatttctttttctgaagttatttgattgaatgtcactgattaataacaatgataaagtattatttatcttgtttgtgtaaatcttgaatcattttttcaattttattactgtattcaattgattcatcatattcaaagaataactctggtactatacgtaatctcattcttgaacctagctcagatttaatgaatccttttgctttatctaaagctttaaacgtatcattaacttcctttttattgccaagcactgttaaaaaaactttggcttgtgataaatcatttgttaattcaacgtcagtaatagtaataaatcctactcttggatctttaactttattattaatgatatccataacttcttttttcatttgttcgccaacacgttcagctctcatattactcatggatatgtcacctctttattatttaacatatatttagaaaagaaggctaaagtggctacctatatcatatacacttcagctctttacaaatgagttatctttcaatttctaccatttcgaatgcttcaataatgtcaccttctttaatgtcattaaagtttgcaattgtaataccacattcgtaaccttgtgatacttctttagcgtcatctttaaaacgttttaacgtatcaagtgcaccttcgaattgaacgataccatcacgaatgacacgtacgcctgcgttacgagtgattttaccttcagttacgtaactaccggcaattgttccaacttttgaaactttgaatgtttgacgtacttcagcttgtccgataacttgttcttcaaattcaggatctaataaacctttcatcgctgattcaatttcttctataacattatagatgactctatgaagacgcatatcaacattttcagcttctgctgcacgtttcgcacctgcatcaggacgtacgttaaatccaacaataataccatttgaggcattagctaatgtaacatctgattcattgattgcccctacagctgtatgaataatacgaacatttacgccttcaacatcaattttcataagagatgcagctaaagcttctacagaaccttgtacatcgcctttaataatgacattaagatctttcatttcgccttgtttcatttgttcgaataaattgtctaatgaaacatttttgctttcttgacgttgttgaatcacatttgcttcatgacgagcttcaccaatacgacgcgcttgtttttcatctttgaaaataacgaagcggtcacctgcttgaggtacatcgttaataccagtaatttcaaccggtgtagaaggcccagctgttttgattctttgacccaaatcatttaccatagctcttacgcgaccatacgtattaccaactacaattgaatcacctacatgcaacgtaccattttgaactaataatgacgcagctggtccacgtgatttatctaattctgcttcaataacagtacctactgcttgcttatcaggattagcttttaattcttgtacttcggcaactaaaccaatcatttctaataagtcatcaataccatcaccatttaatgctgaaagtggtacaaagattgtgtcgccaccccaatcttctggaattaaaccatattcagttaactcttgcatcactcggtctggatttgcagttggtttatcaactttgttgaccgcaacaattgttggtacatccgcttctttagcatggttaattgcttcaattgtttgaggcataacgccatcatctgctgctactactaaaatagtgatatctgttacttgagcaccacgtgcacgcattgttgtgaaagctgcatgtccaggtgtatctaagaaagtaatttttttaccattattttcaatttgatatgcgccaatgtgttgtgtgataccgcctgcttctcctgctgttactttagtatttctaattgagtctagtaatgttgttttaccatggtcaacgtgtcccataattgttacaactgctggtcgttcaattgcatctgggtcgtcttcttcatcatcaacataagttgttaggtcttcttcattaacaacaacttctttttcaatttcaacaccataatcatctgcgataagttctaatgtttcttcatctaatgattggttaatgttagcaacaatacctaataaaaataattttttaataatgtcagatgattcgatatttaatttatcagcaagttctcctactgtaataccttcctcgtacgtgatttttgaaggcatttctttgggttcagcagcaggtttgttattcttaccttttttattatttttgttgtttttattgtttttgctatttttattgttttttttctttgaattagatttgttttgattattatcttttttattttgctgtttttggtgattattttgagtgttttgttttttattttcttcattttttgatgatttgaactttttattaagcatcttaatttggtcatcttctaatgcttgcatgtgattggatacttcaacgtccattttctttaactcatctataatctctttacttttaacatttacttctttcgcatattcgtaaattctctttttactcatataatcactccttacaatattcatcaatcatcgacataagttttttggcaaaacctgaatctgttacgccaacatttacacgttcttctttgcctaatgattgtcctaattctactctcgtaccgaaaactctaaatggaacatgatatgtgtcacatttattctttatattctttttagcgttatctgaagcatcagtagataaaatcacaagcttaatattacgtttttttatttctgatatgagtactgattctccaactttaacttttctagctctcatcgctaagcctaaaaaattaaatatctgttcttttgtcatttaggaatctcttctctataaattaatcgaattacttctttatatacaggatctaatttttcaggactttcattaaaatatttctcgagtacaccatttttttgagcatcttctacgcttttaacatcttttgaaacatatgcacctctaccttgttgttttccagtaccatcagcgaaaatttcgccttctttattaattactactcgaatcatgtcttttttaggacgcatttcattcgtgatgatgcatttgcgcattggaattttcttcttcttcatttactactcaccccacatgcttaaacgtattaatgttcttctttattatctgaagcgtcttgtgcttcatttgaagtttcatcaacttccgctgataattcagttgttgttaagtttgtttcttctaaattgatgtcatcaatttcaatatctttatcttcagaaaatactatttcatcagctttttcttcagattcaattataggataaattcctgcttcgcgagcatctgtttcagatttaatatcaattttccatcctgtcagtttggcagctaagcgcgcattttgtcctcgtttaccaatagctaatgataattgataatcaggtactaccactacagtagattggttatcttcatcaacaataacttctaaaacttgtgatgggcttaaagcattacgtacaaaaacatttggatcttcatcccattgaacaatatcgattttttccccacctaattcttcaacaaccgcttcaacacgtgaaccttttgcacctacacaagctcccactgcatctatatctggattttcagagtatacactaattttagaacgatctcctgcttcacgtgcaactgatttcacaataacagttccatcataaatttctgggacttcttgttcaaataaacgttttaataaacccggatgacttcttgacacataaatttgtggaccttttgttgtttgctctactttattaacatagactttaattctttcatttggaacgtatgtctcattaggacttctttcagcttcagataaaaccgcttcgattctacctaaattaacatacacatatcgatgatcaacacgatcaatcacacctgttaaaatatcttcttctttatcaataaactcagagtataaaatttctctttcagcatctcttagacgttgcattactgcttgtttagcagcctgtgcaccaacacgaccaaagtctttaggtgtgacatcttcttcgtaaatatcacctatttcataagcaggatttttaactaaagcagtgcttaaatcaacttcttcacgatcatcaaatacttcttctacaacttctttacgtgcgatgactttaaatgtgccttcatccatatttaattctacacgaacgtttctagcactatcataatttttcttatatgcagtaattaaagctgcttcaattgcatcaatcaaaacttctcttggaattttcttttccttttctaagtattcagttgctaataataattcattacttgccacaattattcctcctcatcacgttaaatcattacagcgtgacgtgcttttgcaattttatttcttggtatctcaattgtttttttctttgatttttctttaacttccatagttattgtgtcatcatcgacagacttcagaatacctaaccattctttatcaccttcaattggcgcataaagagatacaaatacaggttgctctatcgcattttgataatctttttctttttttagtggacgttcagctccaggtgaagctacatcaagataatacatttcaggaataggatcattttgatccattgcttcacttattttttcagaagcaagcgtacaatcatttaaatctacgccaccttctttatcaatagagattctcaaaaaacgatctttgccttcttttgcatattcaacatcaactaattcaaagtttaaatcatctaaaatgggagtaatgatagtttctacttcttcagtaattttactcatacaggcctccttttttggcaaatagaaaagagcgggtatatgcccactctttctgcctgagtctaaatttttacacaaattaattataacatactttatatgcttaaacaaatgaagctactattaatacatctaagttctccatttacatatcaaaaatggacaactgtgctttatctggtaaatctggtaatgaacctaaatcatcaaggtattcaataattttttgagataaacctgcttttttattaaggtcttctttggataaaaacggcccgtcttcacgtgcctcaacaatacgtttagctacattttcccctaatcctggcacagcaataaatggtgggatcaatgtatcatcttcaataataaaatcaaaagcttgacttttttctaagctaatcggctgcattttaaacccacgatgtgccatttcattcattatttctaatactgttaatacatctttttctttttttcctaaatccatataacgagaatacatatctttaactgtgttcttaatactttctttatctttaatcattgtaattaaatcaaagtctgatgcacgaattgtaaaatatgctgcataatagtataacggatgatgcactttaaagtatgcaatacgtacagccataagtacgtaagcagctgcgtgagctttagggaacatgtatttaatttttaagcatgaatctaaataccaatcaggtacatcattcgctttcatcgcatttatcatttcatccgtaagtcctttacctttacgcacagactccattgttttgaaagccattgaaggttcaagtccagcatacataagatataccataatatcgtcacgacaaccaattacactggataaatcgcagatgcctgagcgaattaactcttgcgcattaccaagccacacatcggtaccatgtgataatcctgaaatttgtacaagttcagaaaatgttgttggcttagtatcttctaacatttgacgaacaaaacctgtaccaaattcaggtacaccaaatgtgcctgtcttacataaaatatcctcttctgttacacctaaagaggccggactactaaatatttgcattgtctccttatcatcaacaggaatcgttttaggatcgatacccgataaatcttgtaacatacgtatcattgtaggatcatcgtgtccaagtatatcaagttttaacacattatcatgaatcgagtggaaatcaaagtgtgttgtcatccaaggtgcactttgatcatctgctggatattgtatcggtgtaaaatcgtaaatatccatataatcaggaactacaataattcctcctggatgctgtccagttgtacgtttaacacctgtacatcctttgacaagtctatcgatttccgcaccacgtttatgaataccttggtcatttagatatcctttaacgaaaccaaatgccgttttttcagccactgtaccaattgtacctgctcggaatactttatcttctccaaaaagtactttcgtatagttatgggcatgcggttgatattcaccactaaagttcaagtcaatatctggcactttatctcctttaaatcctaagaaagtctcaaatggaatatcttgaccttctttaattaattcgccaccacatgtttcacacgttttatcaggtaagtcgaagccagaacctaccgatccatcatcaaaaaattcactcgtcttacaatgtggacatatatagtgtggagggagcggatttacttctgtaatctctgtcattgttgcaacaaagctcgaacctacagaaccacgtgaccctaccaaatatccatcatctaatgattttttaactaaccgttgtgatatgagatagataactgaaaagccattgccaataatactatctaattctttttcgagacgatcaattacaatttgcggtaagtcatcaccatacaatttttttgcatttgtatagcttaattcacgtatttcttcattagcgccctccatacgtggtgtaaataattgatctttaattggaattactttctcaattcggtctgctaattcattcgtatttttaacaacaatatcataggctttatcttctcctaagaaatgaaattcatctaacatttcatctgttgttctaaaatgtgcttctggaagtgtggaacgatttaatggattacctggttgtgatgcaattaaaattttacgagcaatagcatcatgctcaaataggtaatgagcattaccagtagctatcacaggtattcctgtactttctcccgcttttaaaatacgatcatatatttcatacaatgtttcagtatcacgaattaattcacgatcgattaaatcttgataaagtttaggtggttgtacttctataaaatcataatactttgctattttttcaacttcagattgatcacgttgcatcacagctgtaaataattccccttcatcacaagctgtaccaactaaaatgccttctcgatattcatttaataatgatcgtggaattctaggtgttctataataatattttactaaagaagcacttacgattttaaataaattcttaagtccatcttgattttgaactatgagtgtgacatgggttggtcgtgcacgtttataggcatcttcatttgataattttttattaatatctttatgattagccacacctaattctttcatttgttgaaccattttaatgaaaatataagctgttgcttcagtatcataaatcgctctatggtgttgagtgagttcaacgccatattttttagctaagaaatttaacccatgtttaccatattcagtgttaatagtacgtgataattcaagggtatcaatcactccattagttgatggaccaaaacctaatcgttcgtaccctgtatcaataaagcccatatcgaatgaagcattatgcgctacaaaaatcgcatctcctacccattccttaaattctgttagtacttcttcaatttctggtgcatccactagcatgtcatctgtaatgtgtgtcagattaattattgtttctgataatttttcatgtggattactaaatctttcaaatttatctataatttcgccatctttaactttgacagcagcaagttcaataatttgatcatattgattagataaacctgttgtttcgacgtcaaacactacatatgtcgcatcttttaaatttctatcggtaggtttataggcaataggcacgccatcgtcgactaacatgccttccatcccgtaaatcattttaattccatttttttccgctgcactatgagcatcaggaaaagcttgaaccacattatgatcagtaacagctattgctttatgtccccatgctgcagcctgattaacatatgcgctgatgtttggaataccatccatttgactcattgatgaatgtaaatgaaattcgacacgtttctcttctgctttatcttgtttaggtgtctttttgatttcttcaatatctgacatcatcatgactaaatcacggacaaatgtatcttcttctatacgaccttgtgcacgcacccatttacctacacttaaggctttaaagtgatttaaatcatccttattttttctagtaaacatttttaatactaaagaatctgtatagtctgtcactttaagttcaacgatgtgacgtccactttttagttctttaatattaatatcaaagataactccttcaatggctactttaaattcttcttcaataattgtttcaataggtttaatattttcaacgtgaattggctttcctatttgacatttttcaacactactaccgttattatcttgttgttttgctttttcagcttttattttttcaattttttctgtagcttctttagcactttgttgatcttcttcttgaatatgtgcctctaatgaagcaagatcttcatctctattcgaatcgtcagtttcaaatattactttatctatatcaaagccacatttttgaaatgcttttactaaactaccattacatactttatcaaaatgatttctttcaatatcatttgaagtcattatttttaaaacattgcctgacataattaaacgtttttgtttaagttgacccttcacttttggtgataaagctgtgtgttcaatacaatgtccaaaatatttaatcacatgttcatcttgattcgatgtattttgaattgtaaaatgccagtccacatgtgcaatatctttaaactcttctttaattgcatgagtaaagattaaataatcttcatttgaaagaaaataaggtaacgtaatctgaaattcccaacttctatttttatttgatacatctattcgtgtgagttcacctttttcaagtatttctttatccaattgatttgaaatcttaatttgatcggcaagtactctaaatttttcctgacttgtcattgccacaaagaataaccaccttatttcgaacttatcatttactttaaaaaacttgatttatattatactactttcacatttatttttcatgattacagtttaactaataaaaacaataaaagaggttggaaacaacaaaatgttccaaccatttttattcatgtgtacctatagtttttcatagagtgaagcaatgtgattgtctaattcattaatatgaacttcttcactttcacccgtttgacgcactttaacttcaacaatgccttcacttgcatttttacctacaacaattcttatcggtaaaccaattaaatcagcatcattaaatttaacgcctgcacgttctttacgatcatcataaagtacatcatatttagattgcaattctgagtataatttatctcctaattcaagttgttcttcttttttaggattgattgtaattaaatgtaaatcaaatggagtgactgactttggccaaataataccattttcatcattattttgctcaacaatcgcacttaatgttctagacactccgataccatagcaacccataattaaaggttgagctttaccttgattgtctaaaaatttagcattcattgcttcagaatatttcgttccaagtttaaatacttgtccaacttcaataccttctgcaaattttgcatttccagaaccatcacttaatggttcaccttctaaaataaatctaaaatctccgtattcatcgatattaaaatcacgctcaacatttgcattaatatagtgatagccatcttcattagcacctattactatgttatttaaatctttaacaaaattatcagcaataattttaatgtctttattatgaataggtcctaatgaaccaggatttgctccaagtaaatttacaatttcatcttgagtcgccatttccacactatcagtttcaaagtatgctttcaccttcacatcattgagctcatgatgacctcttactaagaacatcatgaattcaccatccactttgaaaatcattgtttttacaatttcatcaattggacgatttaaaaagtcagctaattcttgagctgttttaatatttggtgtttctattttctctagtgatttaatgtctgtatgtttctcattgggataatacttaacttcagctttttcaatgtttgctgcataatcactattttcactatacacaatcgtatcttcaccaatttcacttaaagccataaattcatgtgtatgatgaccaccaatagcaccagaatcagctactactggacgcgcgttaattccaacacgtttgaaaatacgactataagcattatacatctcttgatacgtttgatctaatgatgcttcatcagcatggaaagaataagcatctttcatgatgaattctcttccacgtaataaaccaaaacgtggacgtttttcatcacggaacttagattgaatttggaataatgttaatggtaattgtttataagactttaattcgtctctaacgatagaagtcactacttcttcgtgagtaggtcctaaagcaaattctcttccattacggtcttttaatcgcattaattcaggaccataagccccccaacgtcctgactcttcccaaagttctgcttgctgtaatgctggcattaaaatctcaactgcatcaatattttccatttcttcacgaatgattctagaaatatgatttagtacacgtgttgctaatggtaaataactataaataccacttgtgctttgtttaattaaacctgcttttaataacaactgatgacttaaagcctcagcttcagaagggacttctctcattgttggtataaagactttcgattgtttcattttttatcctcctaaattataagaaataacgttgtatatcattccaagtgactaagaccataataatcactacaaatatagctccaacagcaataattgcagtttcagctcttttatttactggtcttctaaatatcgcttcataaataacaaataaaattctaccaccatctaaagctggaataggtaataagttcataatccctaagttaacactcaacaatgccgtatagtatgttaatgcaataataccttgttttactacagaatctacattgtgataaataccaactggaccatttaacatgtcaaaagtaaagccacctgtaaaaatacttccaatcatcgttccaactgctttaaaaataagtacacttttatcaaaaaattgttgtacgcctaatgctaatggcttaaatagtgaatgttcattcgcaggttgaaaacctaatacataagaagttttagaatttaattttgtttgtttaatcacttgttttttaggtgtaacatctagtgatttggtgtgaccatctcgtacaattttaattgttgtttgatggtctttcgttttattaagtgcattttgaatatcgctaaaatcgttaattttatagtgtccaacttgaacaattttatctccaggttttaatccagcttcttgtgctggataatggtctgctaattgttttaccgtaggagtaggcgtaccttgataataagctaagccaataaacagtacgagagctaaaataaagttaaataatgggcccgcaaataaagttaaaaacttaggtaatggttttttatgtgtaaattgacgatgccttggtgcaatttgaattaaactaccattttcaacaaagtaagcttttttagcaatattaaaatgatgtctttcattatcatatgctgtaataccttcaatatataaatcatctttaaaatcacatcgtttaacttcaatcgcttcaattttttggaatttatgttgatcatctaaaataatatgtgttatttcatcttgttcatttagttttattttaacattcattcctggctgaactggtggttcttctaacccatctcctgccattcttacatatccaccaactggaagtaaacgtattgtatataacgtttcatctttacggaaactgaaaattttgggtcccattccaatcgcaaattctggacacataatacctgcacgttttgcaaaaaacatatgtccatattcatgtactgtaacgagtacaccaaatacgataataaatgagacgattgtgattaagtaactcacttacaacacctcaattaattttaatatttaaattatctagattataagattttaaattttataataattcctagtataaaaaaacagttttaaaaaaagagctataaagtacacgattgtataatattaatcaaatgtgaactcaataactcctcaattatatcattatatgcttttcataaataaataaaacattaattttttattacatttgtagtaatagaatgtttaacagtggtaaaacaaacataaagctgtcaaatctatctaaaataccaccatgtcctggcaagattctgcctgaatctttaacaccaaaatgacgtttaaaaccagattctactaagtcacctaattgaccaaatacacttaaaataattgtaattaataataacagccaaatattcagatgaaaatctacaaaaaacatcattacaagtggaacaattaaactacaaatgagtcctccaataaaaccttcaatcgttttatttggactaatcactggccataatttgtgttttcccattaatcgtccaaatatatatgcgccagtatctgttaaccatacgatcaagaatgcaaaaagtatataatgtaaaccataagaacgtgtagcgtaaaaatacataaatcctattccaacgtatgctacagacattaaacaaaatgcagcgtccataaagctaaatctgtttttcgaaagtacagtataacttaatagtatgaagctcattgcaattaaactttttaattgaacatcactcacccaatctccggcagactgaggaagcataataatgataagcgctaaagcactaaaactacctggaattgataaaaatgtaatcatattcatatttaacaattcttttaaagcaattagcgccagcaaataagcaaaaagcattaaaacagttccaccttttaataatataggtagaaaaataagcaatgctataatcgcggtcaatgttcttactttcataatttactcctcacttaatcctccaaaacgtctttggcgagattgatatatttttatacattgttttaattcttcaccatcaaagtctggccataacttctcattaaaaataaattcactatacgaagcttgccaaattaagaagttactaaggcgttgttctccagatgtacgtattaataaatctggatctggatatggatgggtcattaaatgtttggaaatcatcaattcatcaatatcatcactgttttgaccattactttgaagttcatcataaattgatttcatactttgaacaagttcagctcgtccaccataattaatggcaaatactaatttcaatcctgtattatttttggttttttctttagcataattaattgcctcaattgttgattgaggtactgcatctaaaaaaccaatagtttctatcttaacatttttctctataagttctggtagaaatatttttaaaaaattcacaggtaaattcatgatataattaacttcactttcaggtcttgaccaattttccgttgaaaaagcgtataaagttaaatatttaatacctaaatgacttgcttgacgtgtcactttttttatggtttgcataccttcatagtgacctttaattctaggcattttacgcttttttgcccaacgaccatttccgtccatgataattgctatatgttcaggtaaattatgtatatctaaatcatcattttgattgattttagtcttatttctttttattagctttctaaacatggtctttcctccgagcctgatcatttctgttatattatataggttatttaagaaatcatctatcattttatcatactaaataatggcattgaataagcaaattaaaaaactgtaccaaagtctgacttggcacagtttagactaaaacaatttataatcttgtcatagaagagtatgatgaaatattaaacagacataatatctttttctttttcatcaactaaattatcaatttctttaattgaattgtctgttactttttgaacatcttctgtttggcttcttaaatcatcttcagtaatgtctccatttttttcgtcttttttcaattgatcattgatatcacgacgaatattacggattgaaacttttgaatcttcaccgatttttttaacatttttaactaattctttacggcgttcttcagttaaagcaggaacagtgatacgaataacttcaccgtcactagtagggttcacacctagattagcagcaataatcgctttttcaatatcagctacagatgttttatcatatggagaaatgacaagtaagcgtgcttcaggcacgtttatactcgctaactgttgaactggtgttggcgcaccataataatcaacatttactccatttaataaattagaattcgctctacccgcactaatattagctaattcacgtgataaattttcaattgattttttcattctagattttgtatcttgaattatctcactcatacatttacacctctaattatttagtaattaatgtaccaattttttcgcccataacggcacgtttaatattgccttcttccataatagagaatacatttaatggaatgttattatccatacagaatgaagaagcagttgaatccataacttgcaggccttcttgtaacatttgaatatgtgttagatgatcatatttcacagcatttttatcaatttttggatcggcagaatacacaccatcaacattatttttacccattaaaatgacatcggcctctacttcagctgcacgtagtgctgcagttgtgtcagtagagaagtatggattaccaataccagctgcaaaaataactacgcgttttttctctaaatgtctaattgcacgacgacgaatataaggctcagcaacctgtttcatttcaattgaagttaatactcgtgtatcacaatctaattgctctaaactatcttgtaatgccaatgcattcattacagtagcaagcatgcccatataatcagctgtaccacggtccatgcctaaatcgctacctgttttacctctccaaatattaccgccaccaacgataaccgctatttcacaattcattttagctacttcagcgacttgttttgctacacttttaatgatgataggattgataccaaaacctttttcacctgcaagtgcttcaccactaagtttcagtactacacgtttatatttagaagtatgcgccattattttttcctctctatgattaatgatatgtaatatatacaagtaaagaagacactaatggtcttctataataaaagaattttattatatagaatccttaaaggtgtcttctttcttgttagaataatgtgaacaaattatttcatttgacctttaacttcatcagcaaagttttcttcgcgtttttccataccttcgcctacttcataacgtacgaagtcagctaatttaccgcctttagattttaagaaagcttcaactgtttgatctggatctttaacaaagttttgatcaactgcacaaatttcttgaagatatttacgtaaacgaccttcaaccattttttcaacgattttttcaggtttaccttcatttaacgcttgttgttttaatacttctctttcgtgattaatttcttcatcacttacttgatctgaagaaacatatttagggttaattgcagcgatatgcattgctacatctttagcagcttcttcatcagtagatccttcaactacagttaatacaccgatacgtccacccatgtgtaagtatgcaccaaaagcatcgttatcagttttagttctaattgcaaaacgacgaatgcttaatttttcaccgatagttgagatagcttctttcattctttcatcaactgtttgaccacttgataatttagtttctaataaagcttctactgtttcagctttactttcaaggatttgattagcaatttctttaactaattcttggaatccttcgtttcgagcaacgaaatcagtttcagagttaatttcaacgattgctgcttcattaccttttacttctacatgtactaaaccttcagcagcgattcgatcagcttttttagctgctttagcgatacctttttcacgtaagtaatcgattgctttgtcgatatctccatcagtttcagttagcgcttttttacaatccatcatacctgcgccagttctttcacgtaattctttaacaagttttgctgaaattgccattaattattcctccaatatgtctaattgtaataatagatgatatttaaatattaccattaaaggtactattatttccaatactctattacaatttattaataatttttttaattaaggttattttaaaaataaaatacgatttaaaagcataattgaatatttatcctttatatttatacccaatttactatccgttttaaataaatattttaaaaaaagggcgataagcattacatcttatcacccatttaaactatatcttagtttgattcaacagtagtattttcttcagttgattctgctttttgagtttcttcactttcatctaaatcgatgttttgttctgcagctacttcatcgtttgaaataccttgttgaccttctaagacagcgtcagccattttaccagttaataatttaacggcacgaatagcatcatcattcgctgggataacatagtcgatttcatcaggatcacagttagtgtcaacgataccaacgatagggatatttaatttacgtgcttcagcaatcgcattgcgctctttacgagggtcaactacgaataatgcttgaggcatagatttcatatcacgaataccgcctaagaatttgattaaacggtcatattcttttttaagttcaacaacttcttttttaggtaaaacgtcaaataaaccgtcttcttccattttttcaatttcagaaatacgtttaatacgttttgagattgttttataattagttaagattccacctaaccatctttggttaacgtagaattgaccagcacgttctgcttcagctttaactgattcttgtgcttgttttttagtacctacgaataagactttaccgccatcttcagatacttgttttaagaagttataagcttcttcaactttttttactgttttttgtaagtcaatgatataaataccatttctttcagtaaagatatattttttcatttttgggttccaacggcgtgtttggtgaccgaagtgaacaccggcttctagtaattgtttcattgaaattactgccatgttaaattcctcctattggttaattacctccatagtaaactaatataaagacaatacttaagactgcaccctttatatttacattcactacgtgtgtattggctttatagccgtcaataataatatcatatatagaatcattacgcaacattttttgactgcgtaaaataaaaaaactactatcttaattttaatagatagtagttttaaaaataatttattcacttcgattaagttcatctaagaatttttcttttttaactttgataaatgtacctttcatgccaagcgatcgtgattctattacaccagcactttctaatttacgtaacgcatttacaattacagaacgtgtaatacctactctatctgctactttagatgcaattaatagaccttcattgccaccaagttcctcaaaaatatgttcaatcgcttctttttcagaataagataatgaattgattgccattgtaatagcagctttatcacgggcttctttctcaacttcattatgtttctcacgtaatatttccataccaataacagttgcagcgtattcgccaagcactaaatcattttcattaaagtcatctttaactcgtcctagaatcagtgtacctaagcgttcgcctccccctaaaatcgggaagatagttgttctactattaataaatacttctctgtgttctggagggaatactgtcaagtctgaatcaatatcaatattcgctttagtttgttgaacttgcataagtagttcagtgtattcacttggaatatgtttactttcagtcaacatattactaattcgttcactctttaaaagttcatttaaacttgaccctaaaattttacctctacgagaaacgatgaagacatttgtaacagttacattactaatagtctgagcaacatctttaaagtctaccgcaatgcctttatgtttttgtaataatgtatttaattctctagttttagataataagctcataaaatttctcctttatttatattataaaataaatgcacttaaatctttgtttgttgaaatagatttcaacttatcatcaacatactgtggtgttatatctactactgcatttggcatatttggtgcttcaaaagataaatcttctaacattttttctaaaatagtgtgtaatcgacgtgcaccaatattgtctgtatcttgattcacttgatatgccatttcagctaatcgtgttatcgcttcgtcagagaagttgacagtaacttcttcagtttttaacagtgcttcatactgctttataagagataacttaggttcagtcaatattctatagaaatcattaactgttaagctttcaagttcaactcgaattggaaaacgcccttgtaactcaggaatcaagtcacttggtttagaaacatggaaagcgccagcaccaataaatagcatgtgctcagtatttacagtaccatacttagtttgaatcatgctaccttcaaggattggtaatatatctctttgaacaccttgtcttgatacatcttgaccactattagaattgtttgtagcgactttatcaatctcatcgataaagataattcccatttgttctgctatttctaaagcttcttgattagcagtttcttgatcaattaattcatctgcaaaatcatcagtaagaattttacgtgctatttttactggcacttctctttctacttttcgtttaggcatcaattgattcatcatatcttgcatttgttgattttgactcgtgcctaacattcctaatgcaccagggtcttgttcaactttgattctaactttttcttcttctagcttgcctgctataagttgttgtcttatttctgaacgttttgttttgatttcttctgtaggtgcttcttcttcctcgtcattctgattaaaattaggaatagcaccacctaaaagagattcaagtggattattattttgagctgcttttttcttcatactaggaacaagtaattttactaatttttcattagctttttgtgttgcttcatctttaactaatgatttcttttgctcttttacgagtcttacagacacgtccaccaagtctctaaccatactttctacatcacgtccaacatatccaacttcagtgaattttgtagcttccactttaatgaatggtgcacctacgatttttgccatacgacgtgcaatttctgttttacctacaccagttgggccaatcattaaaatatttttgggcgcaatttcttgcttagtttcttcgccaagaagacttcttctgtatctatttcttaacgcgattgctactttacgttttgcatcttcttgacctacaatatattcgtccaatttagatacgatatctttaggtgttaattttataccgtttgtatccatttactattacctccaccttaatgtatgtccatatcaattcatttccgttttgtttatatatgttatttataaagtctcaacaataatattatcatttgtaaatacacaaatatctgaagcgacttttaagctttcatatgccatttctttcgcagtcatatgtgaagcatgacgtttaagcgctcttcctgcacttaatgcgtagtttcctcctgaaccaatagcgattaaatcatcgtcaggcgcaatgacttcacctgtaccacttaccactaaaataccatctttatccattacgataagcatggcttccagttgacgtaattgcttatctccacgccattcttgagcaagttctacagcagcgcgttctaaattaccgctaaattgttgtaatttagtttcaaatttttcaaataatgtaaatgcatcggctacgcttcctgcaaatcctgctaacactttaccttcgtataagcgtcttacttttctagctgtttgcttcataattacttgttcaccaagtgtaacttggccgtctccagccattgccgcttctccattgtgtcttacagcatatatcgttgtagcatgtaatgatgtcttactcatttatttactctccttttttgctcgagggtgtgcacttaaatacactttgcgcaattgttgatttgatacatgtgtatacttaccagttgtagaaaggttaacgtgtcctaataaagattgaactgttcttaggtctgcaccttgattcaataaatgtgtagcaaatgtatgtcttaatttatgaggatgaatttctgttacccctgctgtacgttcaactacatcattgagaagatatctaacacctctctcagtaataggatcacctttcatattaacaattaaataaggatgacttttacttttaagtggtttgaatttttctaaatattgttcaatactttgtctacaaaactctccaaaaggcacaaatcgttctttatttcctttacccaatacctttacccctggaagattcatatctaaatccataacctttatattcacaagttctgaaacacgaatgcctgttgcatataataattcaattactactctatctcttaatcctttttttgcatcgtttgaaacagtattaaataatgcttccatctcttcttcataaaaaaattgaggaagatattgctctttcttaggatgtacaagttgtataaaaggattatttactgatgtatcttgagtcatccaaaactcataaaatgttcttaatgttgatatttttcttgatacagtagtacgtttcaaattattggaatataaataacttagataatttcttgcatctttatattcaaacgttcttaaatttaacagttcttgttctaaaaactgattaaattgagctaaatcgtcatgatacgcttttaatgtatggtcggagaaatttctttcaactttaagcatattcaaaaatttcttttggatttcttccactaaaaatcccctccatcatatgcattgtagcatataaactgagggggactaaaataattagctatagaattcaaaatcttttgagaatttatgaataatttaaatctataacgtttttttgaaattttctagatagtctagagcacgatatgcttgtgcttcataacgttcttttttatctttaatgcggcgatcaagtgatggcaataaaccaaagttagcattcatcggttggaagtttttttcatttttagcatgagaaatataataagccatactccctatcattgtttctcttgggaaaatcacttctcctttcccaagtaacttatgcgctaaattgatacctgctacaaggccacttgctgcactttcaacatatccttccacacctgtcatttgtcctgcaaattgaattctatcattattaattaattcatatttttcatttaaaacatcaggtgaattgatgaaggtatttctatgcatcacaccatatctcacaatatcaacattttctaaacctggaattaattgaatgacttctttttgagcgccccattttaaatgtgtttggaatccaacaatattataaagcgtaccagccgcgtcatcttgacgtaattgcactactgcatatggacgtttaccagttttagggtcttctaatcctacaggtttcattggaccaaatagtaatgttttacgacctctaccagccatcacttcaaatggcatacatccttcaaaatatttttctttttcaaattcatttaccggtgcaacttcagcttctaataccgcatcataaaaacgattgaattcttcttcagtcatagggcagtttaaatatgctgcttcacctttatcatagcgtgatttcaaatagactttatccatatcaattgaatctttttcaatgattggagctgctgcatcgtaaaaatatagttgatctttacctgtaatttctacaatttctttagctaaattttcagttgttaacggtcctgttgcaatgattgtatgtccttctggaatactgtgaatttctttattcaaaacagttacattaggatgatttttcaatgtatctgtaatataaccagcaaagtcatgtctatctactgctaatgcaccaccagctggaactctggctttatcagctgctgcgatgattaatgaatctaaacgtcgcatttcttctttaagcacacctacaccatttgttaatgcgttaccacgtagtgaattagaacatactaactcagcaaatttatctgtatgatgggcaggcgtttgtttaacaggacgcatttcgattaaattcactttaataccacgttctgctaattgataagctgcttctgaaccagctaatcctgcgcctataacattaacagtttgactcatatacattctcctttaataaaaattctatttttgtacttcttctttataatcacaattagaacaaatcacttgagaactacgtccttttttatgttccatcaagtaatgattacattttggacaatctcttcctattggtttatcccaagaaataaagtcacactctggataattcgaacaaccataaaatagtctatttttcttggattttctctcaactacatcgccatctttgcattttggacaagtgacaccaatagttttaacaatagcttttgtatttcgacaatctgggaaattcgagcatgccataaatttaccataacgtcccatttttattaccataggggctccacatacttcgcaatcttcgccggctggttcatctttaatttcaactttttccatttcttcctctgcgcgcgcaacatctaatttaaaactaccatagaaattatcgataacttttctccaaccgatatcaccttctgcaattttatcgagcaaggtttccatattaactgtaaattcaacatcaataatttctgggaagtaatccttcacttgctcatacacgatttctcctagttcagttggtacaaaacgtttactttcaagtttaacataattacgtttttgaattgtgtcaatcgttggagcatatgttgaaggtctaccaatttttaattcttctaatgtcttaactaatcgtgcctctgtgtatcttggaggtggttgagtgaaatgttgtgccggttcaatttgtgttgcagttactttatcaccttgatttaattttggcaatttattttctttatcattatctttgtcatcttttgcttcaacatataatgtcataaagcctttaaatttgattgtttgtccatttgctctaaatttaatgtcattttgtgttacatctaaagccacagtatctaaaattgcaggagccatttgacttgctacaaaacgttcccaaattaatttatacaagcgatgttgatcacgtgttaaataagctttcatttcatctggtgtacgtaatgtacttgttggacgaatagcttcatgggcatcttgatccccttgtttaccttttgttttacggtttgaagtatactcagtaccatacttctcttcaatatatgattttgcttcatctttagcagtttgtgagattcgtgttgaatccgttctcatatatgtgattaatccaactgtgccttgtcgtttcaaatcgataccttcatataattgctgtgctaacatcatagtcttacgtgctttaaaattaagtttacgtgctgcttcttgttgtaacgtagacgttgtaaatggatttgccgggtatcttgttttttcttttttatttacattagtgatttcaaatgcatcaccatttaattcggatgtaattttttcaacatctttttttgtttttaatttatatggtttgtttttataatgtaagaatttagcagtgaacttcgattttttatatctaaattctccttcaattgaccaatattcttctggtttaaaattacggatttcattttcacggtcaatgactaatcttaaagcaactgattgtactcgaccagctgacaatcctttttttactttcttccatagtactggagaaatattataacctacaagtctatctaaaatacgacgcgcttgttgtgcatcaactaaattcatttcaataccacgaggatgtttaaaactttcttttactgcatccttagtgatttcattaaatactactctgttttcttttgattcttcaagttctaaaatttttgataaatgccaagcaatcgcttcaccttcgcggtcagggtcactagctaagaaaacttttttagcttttttcgcatatttttttaaatctttaacaacaggacctttccctcgaatagttatatattttggttcatagttatcttctacgtctacacccatttgacttcttggtaaatcacgtacgtgtcccatagaagcaataactttatatcgtttacctaaatatttttcaatggttttcgcttttgcaggcgactcaacgatgactaaattatctgccaaagtgaattcccccttgctttttcaattactaaagataaatgataaacggttaattttgtttttgtcaatattttaatccaatatagatatttttttatgaactatcctttgaattttcataattaattatatatatttaattgtttaaaaaacgataatcatataatatatcttctgcttctgaaacaatcattgcaccttcttgagcacgtaataaatttccttttgtcaaagggttaaacattgatccaggtaatacataaacatttctattttgatctaaagcacaatctattgtaatttgactaccacttttaattttagcttcagtaattaatacaccacgagacaacccgcttatcagacgatttctttcagggaattgatatttgtttatttttgttaaaggaggatattcacttatgactaaaccagtttcttcaattatattacgtaactttcgggtttcctttggatagtgatttaaatgaccaaaacctagaactgcaatagttgggagatgatgttttaatgcgaattgatgagctatgctatcagcacctttcgctaaaccggatacaatcgttagtggaatatttataaagtgaggaaatagataatctagtgcacacttagaataatgtgtggcctcacgtgaacctacaacacctaaagtatatgtagatgataataaatgtatatttccacgataaaataatataaaaggatagtcgtaaatagttttaagcaatggaggatattgagaagaaaatgaagtaacatagttaacctgagatctagaaagttgagtttgaatgtaatcgtaagaaatctcttctaattgagtaaaacgcttcttttttaaatatagagattcccattcattaatcatttcaaattgaacatgttcattaacattgaaaaattttggaaatacattgagtaaatgatgaatatgttgggtcgtataccctatccatctcatttttaataaaataaaatcattcatgaaataaatgtctccttttaatttattataccgtgaataattaatagtaaaatttcatttataagacaaatttgaaatataaatgtaaggagtaataatattaaaagattatgtatactttttgatttcataacataaaaaaatagagcgttcagtcatttataatatattggtagtctacgatatatataagaaaaactgccaacaaatttcagtaattgttgacagtttgaattcaattattaattacatcattgctacttcactgttaataattcttcataaatgcctgcttcttttgccgcttcaattagtgttgtaccaatttctgatggtgtatctgctgttttaacgccacattcattaagcgttttaattttttctgcagcagttcctttaccacctgagatgattgcacctgcatggcccatacgttttcctggaggtgctgtttgtccaccaacaaaaccaacaactggtttagtcatgtttgctttgacccattcagctgcttcttcttcagcagtaccaccgatttcaccaatcataacaacagcttttgtttctttatcttcattaaatgctttaagtacatcgataaaatttgtaccgttaactgggtccccaccgatacctactgctgtggtttgaccaataccttcttcagttagttgatgtactgcttcatatgttaaagtacctgaacgagagacaacgcctacatgtccctttttatgaatataacctggcatgataccaattttacattcatctgctgtaattacaccaggacagtttggtccaactaaacgtgtttttctatcctctaaataacgtttcactttaatcatatcaacaactggaatatgttcagtaatacagatcaccatatctaattctgcatcagctgcttctaaaattgaatctgcagcaaatggtgctggtacgtaaactactgatacgttagcacctgtttcttttttagcttcagctactgtattatacactggcacgccttcaaccacttgtccacctttacctggtgttacccctgcgacaatttgtgtgccataatcaagcatttgttttgtatggaaaagggcagtagaccctgtaataccttgcaccattaccttagtattcttatctataaatacacccattttagtgttcccatcctttccttacgcttctttaacaagtttaacaatttgttgtgcaccttcagccattgttgctgctggttcaattgctagaccagattcatttaaaatctctttaccacgtttaacatttgtaccttctaaacgaacaactaaaggtaaagttaattcgacttctttaactgctgctacaataccttctgcaatcacatcacatttcataattccaccgaagatatttacaaaaataccttttacattatcatcacccaagatgattttgaatgcttcagttactttttcttttgtagcaccgccaccaacgtctaggaagttagctggattaccaccgaaatgattaattgtatccattgtagccatggctaatccggcaccattaaccatacaaccaatgtcaccatctaaggcaatatatgataaatcatatttagatgcttgaatttcttttggatcttcttcttctaaatcacgtaactctaaaatatctttatgtctgaataatgcattatcatcaaaatttaattttgcgtctaaagctaaaacatcaccatcaccagttgttacaagtggattaatttcaacaatagaacaatctttttcaacaaaaacattatataaagaaagtaagaattttgctgctttatttacagattcttttggaatattaatattgaatgcaatacgacgtgcttggaatggtgataaccctatcactggatcgattgtttctttaaagattttttctggcgttttagctgcaacttcttcaatttcagttccaccttcttcagaagccatcaatgtaatgcgatcagtagcacgatcaatgacaaagcctacataatattctttttgaatatcacaaccttcttcgatatataagcgtttaacttctttaccttcaggtccagtttgatgcgttactaattgcttgcctaataattcattagcataagtttcaacttcagacagtgatttagcaattttaactccacctgctttacctctacccccagcgtgaatttgtgctttcactacataaacatctgaatttaattcttttgccttttccaccgcttcttcagcagtaaatgctacacgtccttctggaacggctacacccatagcacgaaatatttctttaccttgatactcgtggatattcatcttccatcctcctgtttcttaggttaagttcactttaattatagaaaatgtaagcgcttttgtaaactgaaagtgttatactttttgcaatagtttttaaattcaaataattttaattttattttaattatatcattgatttaacaggctcaaacgttttacgatgatatggcgttatgcctaattgttttaatccttgaaggtgtgatttagtgccatatcctacatttttttcaaaatcataaccaggatatttcagtgctacttccgccattaaaccatccctatattcttttgccatgatactagcagcagcaatagaaacacttttagcatctcctttaataatagaagtttgaggcattgcattatccaatgtcatagcatcaataagtaaatgattaggttgttgttttaattgattaatagcacgttccatagctaatttggttgcgttgtaaatattgaactcatcaatttcttcagcgcttgctatcccgtaagcatagtcataaacaccttctttcaattgttcgttaagtatttttcgctttgttgctgaaactttcttcgagtcatctaatcctaaatattgatgttctttatttaaaatgactgcacaagctacaacaggcccagcaagtggaccacgacctacttcatcaatcccacatattaaagcattaggattgtcctttaatattttattttcatatttattcatttgttgataatgttcttgtgtttcttgatcttttaaaagctgtttacgacgtcgtactatattttgctgtaccccttttcttgtatcactcattaattcatgttgttcaagtgcttcaattgaatcaattgtgtctaataatgctttaatctctttaattgtttgaggcataatctaagtcccctttcatttctgaataaatatccaaacaataagttccaattttagcattacgcacatcattaataatcaattcgatgacagcctcgtaatcaacttcatttcctttttgtaataacccacgtcgacgtccaatagcatcaaaccattctaaaatttctgcatcagtttctacatcaatattgtaatgattcttcaatccttcaacatcatgtttaattaagaattgtaaaccgtatattgctacttcatctaagtgcacgatactatctttaatggcaccagtaaggcttagttttttacctacagtttcatcttcaaatttgggccataaaatacctggcgtatctagcagttgtaatgctttacctactttaatccattgttgttgtttcgttactcccggcttatttcctgtttgagcaatgttttttttagctaacttattaattaatgtagattttcccacattaggtataccaacaatcatggcacgtatagctctaggtttaagtcctttcgctttttctttctcaaacttttctttagtcgcttcaattgcagcattttctacgccttttaaatttttgccgtgtttcgcatcaactgctacaggataaaaacctttatcagtaaagaaatgttcccacttttgcatttcatttaaattcgacatatcttttttatttaaaataactacgcgtggtttttgattaatgacatcatcaatcattggatttcttgaactatacggtatacgtgcgtcaacaagttcaaataccacatctactttcttaagttgttctgtcacttctcttttggcctttgccatatgccctggataccattgaatcaccatgacattcaccctactttcattaaatttatttcaactgttcgattataatcaatatttaaaatcttcactactgttatcagttctattatattttaacatgctattttatattcattaaatcgctaatattaaaaacacatttttaattttttataaaacatataaatacttttattaagaagtttaatactctacaatttagtatgtagtcatgttttaattattaatagtacattctaactacagaggtttaatatgaaaaaattttttacttatctaggactttttatagcactgtccataataggacatagttatgtcatttatcgttttattcacgatggcattttatttacaggtccaaatgatggaatggaacaaatggttccaattcaaatgtatttatttgataaatggagtagtggcaatttgttttattccaccgattttggattaggtggagatttctttacagatcttagttactacttctccacaaatattttatttataataaatgtagtatttattgcaattattaaaatttttattcctttacatacgcatgatgtattattttggatgattaatgcacttattatctcaatgattaaaacaacgattgccatgtattgcacttacttatatagtaaatacatttcaaataacaaatacttaagcttaattgtagcgtttttatttgttatgtcacccttatattatcgctttacagtgtattggcccttctttagtgatgtgtttgtttggatgccgttattattattctctattgaaagagtcttgcaaaaacagaagtttggactattcattattactgtttctttaatactaattaataacttttattttgcatactatctttgtttaataggtgcgggttatatactgattcgtgtaatatttagacatcccaaagatattctctcaagaagtaaagcattttttactttaatcattagtgccctgttaggtttaggtaatagtttatttatcttttttcatggtgctcaaagctttttaaataaccgtcgtgtacctttttctggagcagttgatacattcgaaaaattagatattaatacaaacattttctttgataattatttaattgtattattatttattaccattcaagctcttttaagttttaaattatataaacattattattatcgtttatttgctatccttacctttgtatttattatatttagttttatacctttcatcgaccaagtatttaatggtttttcagcgcctcaaaagcgttggcattttattttagcttttaattccacaatattaatcggattatttttaaaatatttcaaaacactaactacaaaatcttatctaataagtaatgtaatcgcagaattagttatatttataagcgctattatatatcataaatttttagcatggttcatattagtccctattgtatctttaattggactgatggttcttatcattaaagatcgtacatatcgttttaaattaagttatttatataatatttcaattatattattaagtatcttgatctctatagtattcattaaaaatcaaatttactataaagatcacactgatcgtggaaatacgttttatattaattccagtttatatagttccgacttacaacgtgcgcttgtcaaagaaatgaatcaaaataagcatgaggatgaacgtatcgattggagagtcaacgaacaagataatacaccgatgtatcaacattttaaagggttaagtttgtattcaagtattttccatcataatatactcgattattattacgatgctttaaaaattaatttagctgaggagtcattgagtcgatatcaatcaacgaatggacgacaaaatatcgcgagtctattttcagtgcgttatatgatgctaaaaaattatcaaaataacttaccttcctacttcaaaaaaataaaatcaagcgggcaatatggtatttatgaaaatacacttaacttaccctctgttaaagtaactgattctatatacaatagtaaaaaattaacaactgcaattgatagagaacatgcaatgttaaaaggtgttattttaaacaatgaaggcacaagttataaagataaagctcctaatttattaactcaatcatcattgagttataaaaatctaaaacatttaaatggtaatgtctataaagtaattggagataaaggtggaacattaacaatacacttacctcgatcattacgccaaaagtatgatgatttttacgttacgatgaaaataaagcgtggtcatcccgatagtaattacacagtctctgtgaataattatgcaaatcaccgattatttaataattctacttatcgtactggtattgatacacaactttaccgaacacaacttgataataaaggaaacatcaatatcactttatctcctaaaggaacattttatttaaatcttcaacaattaaatggtgaaaactataaaatgttaaaacaaatgcatgaaaaagctgattttaataacaaatataaagatattaaaaatggcgtcgaagtcaacttagctaaacatgataaagggattgcttcaattaatattccttatagagaaggtatgcaagcgtatgttgatggacaccgtattaaacctatgaaagttaattacatgatgacaggcgttcctgttaattcatctgccaaaaaaataattattaaatatcaaccaccttattggaatactatgattttaatttcactaatcagtataataataagtgttgtatttgttagatttgttaataccaaaaagagaaagatgaggaaaaacattgatcaataaaattcggtccaatcgattattgacctttttatctatatttataattgctaatatcatttctttagcagtttattatccatttattcgagattatgtcaaagaaggatttgtatttagtggttccggagatggttttagacaaatgatgccatttcaaatgtacttatatgaacattatagtaagttcaaaggagcctatgatcaatcatttggattaggtggagattacattaaggggttagcctattattattctttatctccgataatgtggattaatttttttataatctgggtaagtcactttttatttcattggcaaacgagtcacatcgccttttgggcaactaaccaattaataatcgcttacgctagaacgattattacaattattgttgtattttactacttaaaatggctaaagttgaaaacggcgccattgcttatcgctactattttatatggtgcatccactcttgttctttactataactatacatggtcattttatggagacttattgattttattacctttatctttatggggaatggaacgtttcttccaaaaaagaagaatagggctatttatcttttcagttgcgctgaccttattttctaatttttatttcagttactaccaagctattgtattagggatttatttcatattaagaatcatttttaaatatcgttatgatatcgtatcaagatgggaaaaattttatttactcgttattggtgcaatacttgcgcttttatctagtattttaggattctatacaggtgtatcttcattcctaaataatgatagagcccaaaataatgactttaatattacattgtttacagatttaacacaaaataaatatcatattttttctgatggtttttatatcacagtttcgattattgcattgatggcgttatttacgtttaagttatatcgtcactactattataaaatttttgctattatcacttggtttttacttattggatcgttatcacaatactttgatagtgcatttaatggcttttcactaccacaacgtcgatgggtatactttttatctatttcaactagtatcttaattgcattatatattcaatatttatctgaacttacattaaaacaatatttacttgtagcaattccggtatttatatttggtttatatcactatatatttacaagtacttatgtcaattggatgattgtaccattatttttaatcatcgttttaacctttgtagtatggaaaaaacaatggttatatcaaccctatatactaatagctattgtgttactattctttgtacaacaaattatgatgacacacgattcacgagctcgtactattgatccgtatgcaacaactacaaaaacattaacagattcaagttattataaccataaacttgctaaaagaattaataatattaagaaacaaaaagataataaaaatcctttccatcgtatcgattatatgtcagcctatgcactcaattcaccatttatttaccattataatggcatttcactttattcaagtatttttgatggtgacatattaaaatactatgataaagaaatgcaaattaatatgcctgttgataagaatagtacatatagatacttagggaaccgagcaaatttagaagccatgtgggatgttcaaaatcgattccgacatcctaacgatctgaatatgccttatggttttaaaaaggtagatactatcaataatggttcagataaattaattcattcagaaaatactattaattatccagccactcatattactaataagatttttaataaacatgatctcaaatcgccattagatcgtgagcaagcgatgctacaaggtgtagtattagatgatgattcaataaaagcgaatacttctttcactcaaaataaaaacctattaagtaaagcatatcaatctacacataatgctacttggaaagataaaattcatttaaacgtagaaaaaaataatggtggtatcacattgacattacctaaaacgttagctaatcaatataaagatatgtatgtcgaaatggatgtagaattgttagctcccgatattgagcattctataggagtaaatgaatatgctcaaaatcgtaatatgctaagttataaatatcgacgttttgtaactcctgtaacaatgagagtaaaagcgtcggatcaattaaagattcgtcttactaaaggacattatcgactatctattaaaggtatctatggagaagattatcatacattaaaacaagcttctaaatcacttaaacctgtgactatttcacaatttagaagtggctatacattcactaaacctaaaggaacttctggatacttggtggtaccaatcgcctatgctaacggtatgcatgcacgtgttaatggacacgatgtagatgtaaaacaagctaacggtattatgacagctattccagtcaagaaaaatgatactcatattgaattatcttatacaccaccacatttttatatactattaattttgagcgttatcggaataataagcagtataatatttagcagatatttaaaaagaaaaaatcaattaaaataaaaagcgcctgggtcataattcctagcaaaatagccagtaaatgagtttattataaattcatttactggcttctttatttacaatactgggtattgttggctcgctttcttagggggacagcttcagcctgtagtcttcagcttgtcttgttcccttaaaagtcttgccaaaatactttgtatttatatgtaattttacattgaaatacttaaaaaataagacatattcgtataatttaataaacatcactacactaaattaacgaggtgccttatgtataatgattataatatgattcaacttactctaccaatggcaatttcagttctcattcccataaatgatatttcacgacatgtaaatgatattgtagaaacaaatactaagactgaatttatttgtccgaacaatcaaagactaggatttaaaaaatatacctatcaccatgataaatatggctttaaaagagactttaaattatatgaatgtgatgatgattcagaatgtcctctgaaacacccatgtatgaacttcaattcaaaaacaaataaaaaataatgaagaattataattgggaatattttaaagcgcaaattaataaaaagctttcaaaaccaaaaacaaaaccatctacagtcaaagaaaaattgatgtggcgcctgtttttagatttataaagactattttgagtttcactcgaatgtccgttcgagatataaataaagactaaagagaactaggatttggactaatggcacttaatataagaaaagtaacagctcaacgagcaaaaaataatcacaaaaattataaaaaagacaatctctatattatttcaatagaaattgtctttatttacttatcctggaactttatgccccagattcttttttaaatgcgtattaacttacccattttttagtatagttttctatatactgattagcgaatttcttgaattcttgcagctttaccacgtaaactacgtaagtagtataatttagcacgacgtactttaccgcgacgtttaacttcgattttttcgatttttggagtgtgtaatgggaatgtacgttcaacacctacacctgaagaaattttacgaactgtgaaagtttcagaaattcctccaccgcgacgtttaattacaacaccttcgaaaacttggatacgttcacgtgaaccttcgacgatacgtacgtgtacacgtaaagtgtcaccagtacggaaagttggtaagtctgtgcgtaattgtgattttgtaactgcttcgattaacttatgattactcatttttatactctccttcaacctatgttcttgcctagacaatcatatagcagcggatcatagtgatttttagtgtcttttcacacttgatatatattagcatactcctagttgtttttcaattggtttttatagctttctaaaaattctttatccttatcacttaattgatacttttctagtaagtccggacgtttatgcaaagtacgtattaatttttgttcatgtcgccatttttctatatttgcatgatttccagataataatacgtcaggtacagtcatacctttatattctcttggacgcgtatattgtgggaattcaagtaaaccatcggagaaagaatcatcttgatgggattgttcattaccaagtactccaggaattaatctaacgatagcatcagtcatagtcatagctggtaattctccaccagtcaatacataatcccccattgaaatttcatcggttactaaattttctctaattctttcgtcatatccttcgtaatgtccacaaataaatacaatatgttcagcttcacttaattcttcagcaattgcttgagagaatggtcgtccttgaggacacatgagaatgacacgcgttttatcagtatgttttaaatctttcattgcattaaacactggttctggttttaaaaccattccttgaccgccaccatacggataatcatccacttgattatgtttattttcagcgtagtctctaaagtttacagtattaacttcaataatatttttatcttgcgcacgcttcaaaatcgaatgatttagaacgccgtcgaacatttctggaaataatgttaggtaatctattttcatcattctaataatccttccattggcgtaatacgaattgttttatgttcaacatctacttctttaacgacatctgctatatatggaataaggtattctttatcacctttaacaacccatacatcattggcacctgtttcaaaaatattaatgactcttccaattggtgtatcattattaaaaaccgtacacccaataatatcagaatagtaaaattcgttttcattcaattcaatatcctcatgatcacgttcttggaataagtaatctcctttatattgttcgacgtcattaatatgattaataccttcaaatttaagcatgtgaaatcctttatgtatacgatatgatgtaatagtcatttctatttcattatggtggtgattcacgataaggacttctccaggttgaaaacgtgtatcagtaaaatcagaattagattttacttttacttctcctttaatcccatgtgtatttacaatttgtcctacttctacttgcatccttatcctccttacatagtcgtttatttatacatattaacatgtttcttataaagtgagaatataataaaagcctgtgacatatcttatgccacagacctgttattatatgatattgatattattatcaattattttgaacgtttttgttcatcaaatgtttttaaaataccttgttttgataagatattgtgaacagtatcagttggttttgcaccgtcttttaaccattttaaagctaattcttcatcgattttaacttctggtgcatttacacttgctggattgtaagtaccgatttgttcgatgatacgaccatcacgtggtgaacgcgcatcagctacaacgatacgatagaatggatttctttttgaacctaaacgagttaagcgaattttaactgccatttataaaactctcctttaaatcttttaatttttattttctacaagaaataataataacaggaacctccaactttgtaaagacttttttctttaccaaatctagatttataaaataaattgtagatttgatgatgtactagctttaactagagcttacctttattcattttggttatgcatgtgccaatgtacatgcgttcctttacttatttatgaaaaagcggaataacacttaggatgttattccgctttcattactttttagaatggtaaattcatgccttttaacatattttccatttggctacgtttaccttttttacctttacgaccattacccgtaaattgtttcatcatttttttcatatcattaaattgtttcattaaacgattcacttcctgcaatgaacggcctgagccttttgctatacgtttctttcttgaaacatttaaaattgctggatcttgtctttcattaggtgtcattgattgaataatagctttaatatggtcaatttgtttgtcactcatatttagcttatctaagcctttcattttattcatacctggaatcattttcataatatcatccagtggtcctaaattcttcacttgatccaattgttctaagaagtcatctaatgtaaatgaagactcacgcattttcttttctaaatctttagctttttcttggtccacatcttgttgcgctttttcgataagacttaatacgtcacccatacctagtatacgagatgccatacgctctggatggaataattctaaaccatccattttttcactcataccaacaaatttaattggtttatgtgttactgcacgaatagaaagtgccgcaccaccacgagtatctccgtctaatttagttaaagtcacaccagtgacatccaattgctcatcaaatgattgcgcaacgttcacagcatcttgtcctgtcatcgcatctacaacaagcataatttcatctggttttgagatttctttaacatcagctaattcattcattaatgtttcatcaatgtgtaaacgtcccgcagtatcgataattacaaagtccaaatggtcttctttagcatatcttaatgcgttatctacaatttgttgtggtttaacttgatcaccttcactataaacaggtacatcaagttgtttacctactgtttgtaattgattaatcgcagcgggacgatatatgtcggctgctactaacattggctttttattatattttttacgcattaacaatgccaatttaccagcagtagttgttttacctgccccttgtaaaccaaccatcattacaactgtgggtggcttattagccattttaatagatgtattttctccacccattaattgtgttaattcatcttgtactatttttataacttgttgtccaggtgttaaagactgcataacgtctgatcccaaagcacgttcggaaactgttttaacaaagtctttgactaccttgaagttaacatcggcttctaacaatgctaatctaacttcacgcatcattgttttaatatccgcttctgttactttacctttaccgcgaattttttgcatcgtggcttgtaaacgatcggataatccttcaaatgccatattaacaacctccttataaattattctagttcttctaatttttggattaaatgtttcagttttttagtatcatgaatagattgtttcatttcgttataaatcatttgacgttgttcaaatttctcatataactttaatttagtttcatagtcttctactaaatcgccagttcttcttatattatcataaaccgcttgtctactcactttaaacgtttcagcaatttcacttaatgagtaatcatttagataaaataattcaagataattcttttgtttttcagtaagcaaagaatgataaaaatcaaatagataattcattcttaacgttttaactaaatcatttttccccattttggtgttcctcattattatctgttaagctttgcatttcatcagggatattatcattttgctcaatcatatcagcaaacaatccatatacataactttcaggattaaatggttgtaaatcatctagtttttcacctaaaccaacgtatttaacaggaatatgcaattcatttcgaatagcaagtacaataccaccttttgctgtgccatctaatttagtgagcacaatccctgaaacgttggttacttctttgaatgaacgtgcttgtgatagtgcattttgaccagtggttgcgtctaaacataataatgcttcatgtggtgcatctggaacagcacgactaatgactcttttcattttgtccaattcttgcattaagtttgatttattttgtaaacgacctgctgtatcacaaattaatatatctacacctttattcttagccgcattgattgcatcataaacaactgctgcaggatcagaaccttcgctttgtctgattacctctacgcctacacgatcgccccaaacttgtaattgttcaattgcacctgctctaaaagtatcaccagcagccaacataacttttttaccttccattttataacgatgtgccaatttaccaatcgttgtagttttacctacaccattgaccccaaccattaaaatgacatttaatcggccatcttcgatattcattgcttctgaatgatcatcttcttggtgataaatttctacaattttttcaacgataacttctcttaaaccttcagtttctttgatattacgacgttgtgcttctgtacgtaattcatccgttaattgcataaccgtattgaaacctacatccgcagtaatcaacatttcttctaaagcttcgaagaaatcttcatctacagttcgataacgtgcaatcaagttatttaattgctcttggaagttttctcttgatttttctaaacctgctttaaatttcgctcccattttttgagcttcaatttcttcaaaatcttcaattgaaattaacccatcttcatcgaagtcagcttcgcttaatttacgtggttttttcttttttggtgcaggttcttcattttcttgttcattgtcttttgttgatggttgatctaatttctcatcttccgttaattccttttcaatatcttcagtcgactttgtagaaaatttatcttttagtcgtttgaaaaaactcatgcattttcctccttcataacctcatctattgtatttaaatttacacttactaattttgaaacgcctgactcttgcattgtaacaccatataaacgatccgaatactccattgtaccttttctatgcgtaatgacgataaactgtgttttttcagataaatcatttaaaaattgtgcgtaacgaataacattggcttcatccaaagctgcttccacttcgtctagtataacaaatggtgctgatcttacttttaaaatagcaaatagtaatgcaatagcacttaatgcgcgttcgccaccacttaatagagaaagatgttgtaattttttacctggtggttgaacaataatatctactcctgcagacaagtaatcatcatccgtaagttctaacttggcatgaccaccaccaaaaagtgattgaaatacagatgtaaaataatcttgtacttcaaaaaatgtagctttgaaacgatcttttacttcttgatccatttcatcaatgatttgttctaaagtctgttttgcttctcttaaatcatttctctgttcattcaaaaatgtataacgctcatttaattcttcaaattgttcaatagcattaacattaactgaacctaattcttcaattgacatcttagttaatttcactttttttcttaatgtttctattggaacatctgattgatacgtttctctcgcacgttcaagtgtaagatgatacgtttcatttaaatgattcattgcatgattaataagaacatctaatttagactgttgggccttaatatcttgataaaaactttcaatggataataaatcttgatggcattgttcgagtttgtactcatgaatttcaatatcttcatttatagactctttttgttcttttaaagcatcaagtttttgttttaatgtgtcacgttgagacgctttatcttggatacttgattgaagctgttgaaatgctttttcgcccatcatatcgtcagaattaaataattctattttctctttagttgctatgatttgttggttaatttgtgcatgttgtttgtctattctttccaacgacatagtttgatgacttattttttctttaacgactgcaacatcagaacgtttttgatttaattctttttcaacttgcgatacattttctttaccctctttagagagctttgaatatacctctatgtccttttcaagttgttttagttgctcttgaatttcagataaccgtaattgttgttgttttaatgtatgacgacttttttcactttgatagccatcatttttctcaaattcaaattcttcatgttcactttttatatgtgtttcttgtttttttaatcgatctaaagtcaatgtttcttcgtgagcggtggcttttaattgatgatattgttgacttaaatctacatacttattacttaatgtctcaacttcctctttttgattttgcaattgttgttcgaattcttttgttttctcttcgtagtcgtttaattgtgttttcattgttgtcaattcatctttttgagctaaaatactttttgattgacgcattccgccacctgacattgatcctcctggattaacgatatctccttctaaggtaacgattcgcgctttatattgaatcgctcttgcaagttcattcgcaattttaagattctccactataattgtagtacccatcaaattatctatgacagcttgatacgtttgattaacttcaactgcttcagatgcaatattaataaaaccatcaaaatttcgagctacattttggatatgatgagataaacttcttgctctaattacatttagtggtaaaaatgttgctcttcctaatcctcgttgttttaaaaattttatcgcctggcgaccatctttttcattatttacaataatgtgttgtaaggaggctcctaacgctgtttcaatcgcttgtgttaattttgatggtaccttgatgacttcggctactgcaccatgaataccacttaaagtattctcttttgcttttaatatatgttttactccattaaaaaagtaggaatagtcttctgcttgtgtttctaaactttccatacgcacacgcattttatcagtatatcgatacgcttgatataacttatcttcatatgtcgcttctatacgttttgcttcagataaacgatattcaacgtcacgcatgtctttctctgttacattcattttttgtgatgtagtagtatgcgcttgttcggtttgatgtatgtccttttgaatatgtttaagttgatcaaatacttctattaatcttgcatcgagacgtgtttttttggtttcattttcttgaatagtacgttctaaaaaacgaatatcattattcacttcagattgctcggacattaattcataatattcatttttaatagtttctaatttttcatcatgttgtgcatctgtaagattaagttttgattctaactgtttaatctctttattaagcgattgatgctgttttttaagtttagatacttgttctaaagaaagttctctttcatcttgaacattctttaattcatactgtaaattatctaattcttcttcaaaacgtgcattcgtttctgattgatttctttttcgctcttcaaggacatttaattttccaataaatttttcatattcctcagttgtagtaattaaatctatattaacgtggtcggtatctctttcaagtttttgacgttgtgttttttgtttttgtaaatattgatttaattgagcttgttggccttctttttcagcttgttggctttttagatgattcaatcgttcatcgagttgacgattctcttcatcatattgattaatatcgtgtacagttacgacaacatcactatgctccatctcttttgataattgtaagtattctttagcaatagatgcttctgcttttagaggttcaacacgcccttctaaatcatataaaatatcttctactcgagatagattatcttctgtatgacctagtttttgtaaagattccgtttttctttttttatattttaaaacacccgctgattcttctatgatttgacgtcgatcaacaggtttagcatttaaaatttcatctactctaccttgtgaaataatactaaacgcttcttttcctagaccagaatctaaaaataactctgtaatatcgcgtagacgtgccctatcattatttaaataatattcgctctctccactacgataaagacgacgtgttacaatcacatcatcagcctcaatctgcaactctcttgtagaattatctaattttaattgtacttctgcataattttgtgcttgacgatgttctgcccctgagaaaataatatcttccattttagagccacgaagcgacttagcagattgttctcctaaaacccatttaatcgcatcagtaatattactttttccactaccatttggaccaacaattgctgtcacgcctctatcgaactgtacattcgtacgatctgcaaatgacttaaagccaatggtatctatagatttcaaataaaccatactcttctccttaattcattcatactcgttcttgttgaaaagaagataatatatgaaatgcgttcattattatttgttctcatctcttaacttatgataagcactttcagctgctttttgttcagattctttttttgttctgccttgtccttttgcgattgctttattttctaaaatcacttcagatgtaaataaacgatggtgtgctggaccttcttctttaatcaaatgatacgtcacatctcctttactttgactatgaatatattcttggaattgtgttttaaaatcgaccacgccaattaattcattatgttctacatatggaaaaatgactttttgagcaaacttccagactacttctaagccttggtctaagtataaagccccaataaacgcttcaaaagcatctgatactaatgaaggtcttgttctaccgcctgttttttcttcgccttttccaagtaaaatgagttgatttaattcaattttatttgcaaatattacaagtgagggttcacatacgattgtcgctctcattttagttaaatttccttcaggtaaattaggatatttgtcaaaaaggtaacgtgaaaccgtcaattctaataccgcatctcctaaaaattctaaacgctcgttatgcgctaatcgatccatattaaaatcattaataaagctagagtgcgaaaacgcttgttggtacacatctaaatgagtataactaagaccaagcatcttcatttttttatcaaattgatattgaaaatctttaatcatttctgattgtttcgggtgcatgattgataaacctccgttcatgttattgatgtcctatgaaaaaaatctgagccatcatgacgacgactcagatgtaagtttttatttttcaagactattgatgtatttaattgcatcaccaacagtgttgattttttcagcttcttcatcaggaatttcagtaccaaattcgtcttctaattccatcactaattcagcgatatcaagtgagtcagcgcctaaatcatctttgaaagatgcatcttctgttactttatcagcgtctacacctaaacggtcaacgatgatatcttttactttatcgaagttttccacgtcgattcacctcctttaaaagtgtctatccatagactattatattttcccattttaagggctaaaacacaagtatttattaaaaggatataatgactatttatccttttaaatacatgacgtatatattacatatacatgccaccattaactgataacgtttgaccagtaatatatttcgcacgattagatgctaaaaatgacactgcataggcaatatctttatcttctccaaaacgtgataatggaatttgctccaacatttgtgatttaagatcttcatttaatgcatttgtcatatctgagacgataaacccaggcgcaactgcattaacagtaataccacgtgaagcaagttcacgtgcacttgattttgtcagtccttcaatacctgcttttgtcgctacataattagcttgtccaggattacccatagccgctacaatactagataaattgataatagcaccgctacgttggcgtaacatttgtggcgtagctttttgaatacaattaaatgtcccttttaagttagtattaataacgtcatcccattcttgctctttcattcgcattaataaattgtcttttgtaatacctgcgttgtttacaagaacatctaaagagccaaattgatttacaacttctttaatcatggctttgacttgatcaccttcagcaacgtttgcttgtattgcaaaactttctacgcctttttctttgatttctttaaccactgcttctgctttttctttattacccgcgtaattaactgctacattgaatccatcttctgctaattgcaatgcaatactacgtccaattcctctagaagcaccagttactaatgcacttttagtcattttcattccatcctttcacatcttctaatgtttgaatcgatgtaatttttacatctcgattaatttttttaattaaaccagataatactttaccaggcccaatttcaataaaatgatccacgccttggtctattaaccactctgtagatttaataaattgtactggtgaatagagttgtttcaccatattttgtttaatcgtttctgcttttgtttctccatgagcattataattttgaacgataggaaattgagcatcattccaagtgaattgatcaataaatgaagcgaaatcctcttcaattacttgcatcattgaagaatggaagggacctgatactgctaaaggaatcacacgcttcgcacctaaaatttttccttctttagttaatttatcaatcagcgccttatgcccagatacaacaatttgacctggtgcattaatattggcaggttcaattaattgatctccaaatgaaatttctttacaaatttcatctacttcttcataacttaaccctaaaacagcagccatacttcctacaccatttggaaaagcttgagtcattaattcgccacgcttacgcacaattttcactgcatcttcaaattttagtacgccagcagccactaaacttgaatattcaccaagactatgccccattgtatagtcagcatctatacggtttagtgcttctagtaatgcaatactatgtgttaacaatgcaggttgagtattctcagtttctcctaattttttctctttatctgtaaacatcgtttctaataaatcaaaatcaacagttgtttgcgctaattctaaaacagaagtcgcatctttattaacatgatataaatctttagccattcctactttttgtgcaccttgtccaggaaaaacaattgcagttttactcattgtcaccacctaccgtttctctcataatttttactatttgttcatcaccagcaattttagcttgtcgaattgcagaatagaatgcacgtgcatttgaaccaccatgtgcttttactacagtaccatctaaccctaaaagaacagacccaccatattctgcatagtctaattttttcgcaaacttactgatatcttttttcaatatcgcagcagcaagcttattttttaaattagctagtagtgtaccttttaacatttttccaattgatttagcagtaccttcgatgttttttagtaccatatttccagtataaccatcagtgacaactacatctgtgtcaccctccatcaatgttttagcctcaatatttccattaaatcggagagtcgcttcatcttttaataattgatatgtttttttagtcaaggcatttccttttgctggttcagttccgatattcaacaatgatattttaggttgttgaatacctctaattttttgagcataaatattacctagctgtgcatattgcaataagtgttcaggttttgcatctgcattggctccaacatctaaaaagacaaatcctttaccatcgatagtaggtaatgtgacaacaagtgctggtctagctacgcctttaatacgtccgacgataaatagccctgctgacattaaagcacctgtattaccagcagatacacaaccatctgcctcaccagatttaaccgcttctgccatgcgtaccattgagctgtctttttttcttttaatggcacgtacaggctcatcttccatctcaattttttctgaacaatgtctaaactctatgcgcttatgatttaatgtatattgtttttcatcaccaaataaaataatttctaaatctttaaaatcattgattgctttctctacagcttctaatacgatgcctggtgcattgtcgccacccatcatatctacagcaattttaaccatggttttcatcctcacttatataaaacattttaaatacgcctgtaaaaacgagtgtatcttttacaaaagattccacttttatatcataatgtcgctttgttctattgattacggttgcttctgctctaacattatcatgcaactttactttttcaataaatttcaaattactttcttgagttaaaacagtagagttatgtattagggctacacataatgaattagcttgagcaaataaaatatgcccacgtgcaatacgtgttttttgaaacacatactcttctgtaatttctataatagattgggcagaataattaggtttaacttgaataagatccccaattacttcattagcttccaatcctttgatatattcataattttgtttggctacagatttaatacgtttacgtaattcaggaatattaagttgtgtgcgatccagacggatagtttgaatacttacgttgaataattcacacaattcactatccgtaataaaggggttttcattaatcgccttcttaatctcatgacgacgttctgttttttttaatttcatactttcctcccctttaaatattttagtaccaagtcttaatcattcctcacatatcataacactttctatttattatcctcaacaaatattacattctcatataataaataatttgaattaaatatcagtttactgatgttaatcaaaactcatgttaagtaagtggtcgttgataaatgctcttaaacgttcatatttctcagtaaaaaactccccagattgaatgagttctgcggcctcatcacgagctacttctagcatacgataatcttctactatattagcaaccataaaatctggtaacccgctttgtttaactccaaagaaatcaccagggcctctcatttctaagtcatattcacttaattcaaatccatctgtagtttgtgtcataatagtcattctttctatgccagtttctgttttaggtgatgcaattaatacacaataactttgatgttcactacgtccaacacgacctctaagttgatgtagtgtagataatccaaagcgatcagcatcataaatcatcataaatgtagcattaggaacattaacgcctacttcaactacggttgtcgacactaagatatcaatatcatgattactaaaacgtgccattacatcatctttttcgtctgctgacattttcccatgtaataaacctacatgtgttttaccataaaactcttgtagtgactcaaaaagttcaacaacattttgtacatcttctaggtgttcagaactttcaattagtggacaaatcacataggcttgacgtcctttttttagttcgcttgtcatttgagctaacacttggtcatactgttcatgtttcgcccaatgtgtaataattggctttcgacctttaggtaattgtttaattgaggacacatccatttctccaaatactgaaatggctaacgttctcggtataggcgtcgcagtcataaacaatacgttggtcatagcacctttttctcttagtaattgacgttgattcacaccaaaacgatgctgttcatcagtaataactaaccctacatttttaaattgtacatcgtcttgaatcaatgcatgcgtgccaattaaacaatcgatcgttccattctctaattgttctaacaatacacgtcttttttttccttttaccgatccagttaataaagcaacattcatatggtcaccaaaaagttctgttaaactatttgcatgttgttcagccaaaatttctgtaggtaccatcagtgcagattgatatccagcagttttgagtgcatacatacaaattgctgctacaactgttttccctgacccaacatcaccttgtaataaacgatgcatgcgtattggcgctttcaaatctctaaatatttcattaacgctcgatttctgtgcatctgttaattcaaaaggtaacgactggataaatgacttcactttattaatattataattaatttcaatggcttcatctgaagctttttctaagcgatttaaccattgcatacgtagttcaaacataaataattcagtaaaagcatatgtacgtctcgcacgcataagagcttgtttatctttaggtagatgcaacgttttaatagtataatctagtaattccaatttgtacctttgtcttaattcctccgtaatccattcatgtatagtgacatcattaagagattgatgaatcatatcacgcatttgtttttgtttaataccttctttaagtcgatataccggttctaatctcacttcttcagtagaggtatgagtgtcattaaaaaaaatacgattgccattaatttcttgtttagcacgattccatttaccttttattgtcactgtttgatttaactcaattttcttttttaaatacggttgattaaaaaatacacatttaactgcgatattatcaatcattaaatggacagttaattttgatttattccgaccaaaaaaggctaccgtgggtacagaataaatttctcctgctactgtcacagtagattgatcttcagctaagtttaaatctacaacagtattatcttcataacgcgttggtaaatacaacactaaatcttctattgtgtgaatgtttaattcatgtagtaaagcaattctctttggtccaagtccttttatagattgaagcggatatggactttcaattaaactaactttcgacattatttctcacctaatatttttaatcttatttatattttatcacgtttattataaatatttagtgataccatcttactatagtccacttgacaaatgaatatcactcacttcatttaaacgtacaacattcacttttaatactaatatcgttttatcatacttaactaataatatgaaagagagcataaatctattttaaatgattttgcattagctcttaatcttatttaaattttagaagtacgaagtatttttatgttccatcaaggtttaaatcaaaaaacgatttatacatacattcccagttattattactgctaaattatatgatatttttttaatcactctttgaatattagttatcttcttaattgtgatatcttcctctattttacagttcattattgatagcatatttttctattttaatatatattgactggtcattatgtcttgaaaaacctattaaagtaagttttccagtgtcatatttttcaatacttttattaaatataaaatggggagtgacaacgataatcatttcatcgttatcactcccactattaaatctcactttattctacagcaaataaatatggataaattggttgatcacctttatggatttctatctcaacatctggatattcattttctacccattcttctaattgagttgtcatatcagattgtgcatcttcaccagtaatcactgttaagatttcactttcttcatttaacaatgtacttaataagccagtaatagttttaaattcatctgcattactagtcacaattttactttcagctaatcccataaattcatcttttttaatatctacaccatcaatcttagtatctctgacagcaaatgtaattgagccagatttaacagtttctaacgctgtattcatatgagacgcattttcttctaacgtagatgcaacatcatattggaaaagtgctgcaataccttgaggaatagatgtagttggaatgactactgtatcagctttaacaagttgtgctgcttgatcactagacattctaatatttttattatttggcaagataattgcacgctggcattcagactgttcaatcaccttaacaatatcctctgtagaaggattcattgtttgcccaccactaataatgtgtgtcacacccattgaagtgaacaactcagagataccttcacccattgaaatggcaattactgctgtttcaactgttttaggttgttgcgaagctgttgcttgttgatgactttgttcttttctaattacttcacgatgttgttcacgcatattttctacttttaatttaataagctcaccatattgttgtccataattgaacacttcacctggtgtttctgtatgtacatggactttaactatttcatcatcattaataactaataacgaatcaccaaattcgctcatgtcatttctgaatgtttgttcattaaattcttttttatcttttccaaagcgtaccatcatttcagtacaataaccgtacttaatatcttctgtattaataaccccatgaaaatcatgttcttcatgaaccaaatcttctgtgtctaatttttgtttgttagcttcaactttttcgccttttagtccttttaaaaagccttcgtagacacacaataaacctttaccgccactatccactacgcctacttcttttaaaactgctaataaatttggcgtattatttaaagattgctcagctttttcgattgtatattccattacttcgatgcaatcatctgtttcttctgctttagtcatagctgcacttgctgcatctttggcaacagtcaaaatagttccttcaactggtttcatgactgctttataagctgtatcgacacctgcttgaaaactactagcaaattgttgagcattaatttccttttcatcttcaatatttttgcaaaatcctctaaataattgagataaaataacaccagagttaccacgtgctcccattaaaagtcctttagaaaaagttttacctaattcaccaatactttgagataaattattttcaacttcttcgcgacctgaggtaattgttaaattcatatttgttcctgtatcaccatcaggtaccggatatacattaagggaatcaactaaatctgcattattagataaattgtgtgccccttgtattatcatatcggcaaataatttaccattaattttgctaatcatcgtgctttgtcctcctataccttcttgcccttgttattaagtcttacaccttgtacaaaaatattaatagaattcactttaatattaagtgaactttcgagtgtatattttactgatgattgtacattgttagctacttcagaaattttgacaccataacttacaatgatgtacatatctatatcaatcacaccattatcttctttaacaacaatacctttagcataattctcatgtcctaatatttcagcaataccgtctcttacttgttgtctagatgccatgccaacaatgccataactttctacagctttacttcctacaacagaagcaatgacctcatttgagatatcaattttgccatagtcatttaagatctctaatgtcatcttcattatcctcctgaattatggttaaaatcatatttaaaaatgatgtatacatatatgataaagataactattttataaataagccaatctacataaaaatatattataataactccacaatagttaattataccatagatttacattttcaaaacaattaacataaattacatatgattttattgctttaaatattgatatatggtatcttatttaaagtatataagtagttaagtgtatttatatttattaaaggaggtactttgatgggtaaacaatgttacgtaacaggtcgtaaagctacaactggtaataatcgttcacacgctttaaatgcgaacaaacgcagatttaacgctaaccttcaaaaagttagaattttagttgacggtaaacctaaaaaagtttgggtttctgctcgtgctttaaaatctggtaaagttactagagtttaataaatataatgcactaaaaatgccttcatatgtggtgaaggcatttttttattactctaaatctttacttctcatttgcaatacttgacctttttcaacttcgataatcgctattgattgatcgacttcattagagattgtcagtgtagagcctatttctaaatgctgatgatctaaattatatttaaacccagataaagatactatcacttctccatttactggaataaatgaaacatattgatatttatcagatttatgaagttgatgtgtcccagtattaagtagcatgatttcattttgcttatctattactttaattataatttctttttttatatagactgacttgaaaagaatttgtaatgttcccataaaatgatctaatcttccacccgttgctccatagatatctatttctgtatatcccttttgaatggcttgttctacgcctaatgctaaatcagtgtcatctttttcagctttaactggatgaatatttaatgttttttttaaaatttctctttcttcatcattgacggagtcaaaatcgcccactgaaaaaacaggtacaatactttgttcagaaagaattaaagtcccacggtctattccgccccacgattcagttgataattttgaaaaaatatgagggggtaaatgccgatctccacatagtaaattaattttcattatctcaacctctcaatattttagtcactgttttataatcatcttggttaaaaaagtatgaacctgtaacaaaaaggttagccccatgttttgcacaaatatctatcgttttatcatttataccaccatcgacttcaatatcaaaatttaaattaaaagatgacttcaaatcatttaataacttaatttttgaagcacacatgtcgataaatgtttgtccaccaaatccaggattaaccgtcattactaaaacataatccaccatagaaagaacaggtacgaccctatctacaggggtgccaggattaattactacacctgcttttttatctagacttttgataagttgaatagcacgatgaatatgaggggttgattcaatatggactgaaatcatgtctgccccatgttttgcaaatgtctcaatatagttttcaggattctcaatcatgaggtgtacatcaattggtaattgcgtagttgatcttactgcatctaatatgggtaatccaattgatatattaggtacaaattgaccatccataacatcaaaatgtagaccgtcaacgcctgcttcttctaataattgtatttcctgttttaaattcaaaaaatcgactgataataaagaaggaaaaatgtgtctcattaatatctaacctttctattcgaaatttcattaactaattgtaaataatgttcatagcgaaattgcgctaaattattgttttctaattgatgtttaacattgcatttaggttctttaatatgattacaatttctaaatttacaatcatttccaaaagcattaatttctttaaagtaatactttacatcatctttttcaatatgatcaaaatcaagtgcactaaaaccaggtgtatctgctataaaaccattttctctttcaaatagttctacatgtcttgtcgtatgtttacctcgattaagtgatttagaaatatcattggtttcaagatttagttctggtttaaacgtatttataaatgttgattttccaacaccagattgtccacttagcacaattagaccattaggccaggtattcacaatatcaactttatcagtttctttacctacaaattgaacagaatatcctatttccttatatgtatttagtaatgtttcgatatgactgatttgcgtttcactagcaatatcttttttagtgactaatatactaggagataagttgtaagaatgtgcaatcactaaaaatctatctaacaattgtgttgaaaaattaggttcaaccgcactcattacaataaccagaccatcaatattacttactggaggacgctttaatgcattgtggcgttcatgtacgtggtgaatataaccttcatcttcattttgaatatcaaagtcaacgatatctcctactacaggagaaaattttttctttctaaaaagaccacgaggtttagtattatatttttttccacctacatctacttgatatactccactaattaatttaacaatacgtcctgtttccaaattaacacctcaaattaagtatttatatttatattattatagcaaacatagaattaataatatatattctataccatcatcataaagataaggatagaaagacattaaaatcgctcaaaaaagttaactttacataataaaattatagttgttaaaaagacaatttctatattatttcaatagaaattgccttttaaaattgacatcatttatatcataaaatacatgttaatgtataaacagtaaacgatgcataacttatcattactatcttactcttgttctgatatttgaaatttattcatagtcaatatctttatctgcaataacattgtcatctacttcaatcgtatatccagcagaatcaccttgttcaatttttaatggaatagtaatgatcttatctttgtgaatattgtatgtttgacttacctgtgtaccactattatttttatctctaatataaatctttaccttttgactttctccatcatttccagtatacggaatatgataagtttccgtataattttttacgcttgtcgtatgattatctttcttatcatcagaagaatctgagtccttttttgaatcttcttttttatctttacccttagaaaccataaattctactgtacttccttcatttacttcagtctgctttggagattgtgaaataatgatatccttatctttagtatcactattagtcgtcttaacttgtacgtttagacccatcgactctaattcttttttagcattttgataatttttattttcatagtctttgacgtaaactttttttacacctaacgattcagtcagtacaatatgatgatcgttaagtttcaccgattcattagggttaatattttgcttgaaaatatatccttttggcatttgactattatattcttgattaattgtcacatgatttaatttatgatctttaagtttttttatagcctcttctttttttatcccgatcacattaggcatatttatcttttctgggccttttgataacacaacatctactttttcttgttggttaacacgttctcctgctttaggattggagttaataattttattttcgggatagtcatcattatattctctagatatatgtcctatttctaaatgcgaagcttttaatactttttctgcttctttttcagttttacccgttaaatcaggcatttctgtatatttatcactaagcatgccccaagcgataaacccaatcaaacttaataataaaagcgctaaaataaaaataatagcgaactttttctttttagaacgttttttacgtttaggtgtgtatacattattttcacttgcttgaaatttatgatgattgataataggaatttgcatcgtttgcgctatatcttttttatgagtttcttcttcgagtttattttttatttcttttttatcaatgggtactgtttgggtggtatcacttatacgcgtatgcttttcttcatttaatctgcttgtaacaagcacactactcaaatcattatacatttcttctatcgtttgataacgatttttaggatttttttcagtcgccttaagtaccacattacttaaagattgtggaatatttggatatttttcagtaatattaggaaccgtttcttgaatatgtttaatagcaatacttacagctgtctctccactaaaaggtggttcaccaactaacatttcatacaacactataccaattgaatagatatcggttgtttcattcgttttatctcctttagcttgttctggagataaatattgaaccgttccaagcacatgatttgtttgagtcattgatgtctcacttaacgcttttgcgatgccgaaatcaaaaatttttaaaattttatttttattaattagcacattttgaggtttaatatctctatgtataatacgttgctcatgcgcttgttttactccatttaaaatttgcttaataaaatcaatagctgtttctatattcaatggaccatgactatgtatatactcagatagtgtcggcccatcaatatattccataataagatagaaattatcatcatcttcttcaacatcatatacttccacgatattttcatgaacaatttgtgtagcactatttacctctctgtagaaacgtttcatagtttcatctttttcgctttggggaatagaaattgctttaatagccactttacgttcaagtatagtgtcttcagcaagataaaccatactcattcctccgccaccaagtttatctaagagttgatagcgatcattaattagcttgccattcatacattattaccctcaatttcagctaatagtacactcacattatctttagattgatgatctaaggcagcttgtatcagtgcttctccaagttcatttaatgatgtagactgattcattaacgtttctatttcgtgatttcttacataatctgacagtccatcagaattaagtaatatataattatagtaactgatgcgttttgtaaaaatatcaggacttactcggcgatcggtacccattactttagtaattatattacgttgaggatgattaaacgcttcttcttcagtaatttgtcctgtcataagcaaatgattaacaaatgaatgatcataggtaatctgttcaatttctcttgaattaatcacgtatgctctagaatcaccaatatttgctactacaattttattatcaaatatgagggcacatacacacgttgtgcccataccacgatattcttcattcgttgtagcatattcaaataattcgagattaatatcttttaatgtttgacttaaccatgattcagctcggtctaattcaataaaattttctttttcaaaatagtcttgtaattgattagtaacaaattgacttgcaacttcacctgctttatgaccacccattccatcacacaacactaacaattgttgatgtgtttggttataaaatatacctcccgcgtcttcgttcttttctcgatgttgtccagtatctgtgaaaaactgtgcgttaagcatgatgattacctcgtttctacttgtcgttccttagctcttaattgtccacatgctgcatctatatctgaaccttgttctcttctaattgttgcattgatgcctaaacgtttcaattctttttcaaatttaaaaatatcatctttgggtgttttaacataattacgttcaggaacatgattgactggtataagattcacatgacagtttaaatctttaattaaatgtgctaaatctcttgcatgttcaagttgatcatttacgcctccaaacaatccatattcaaatgtaattcgacgattcgttttttcttgataatatttaattgcttccattaattttccaacattatacgctctattaattggcattaattttgaacgaatttcatctttagcagcatgtaaacttactgcaaaattaatttgaatttgttcatcagcaaagtcataaatacgtgggataattcctgacgttgatactgtaatatgtcgcgctccaatgtttaaactattatcgtcattgactatttttaaaaagtccatcatttcatcataattttcgaagggttcaccaattcccataataacaatttgtgatacacgttcattagtagcatcaagtgctttttgaactgtaagtacttgagatacaatctcgccagcctctaagttacgctttaaaccacctaaagttgaagcacaaaatgtacaaccaattcgacagccaacttgagtcgttacacatacagaattaccgtaatcgtgtctcattaataccgtttcaatagtataaccatcttgtaattcaaataaaaacttaattgttccatctttactttcttgtttaactacggtagttaacgttgtcataacaaagttatcttttaacaattgtcttaagtctttagataaattagtcatctcatcaatagtgtctacacgcttttgatataaccattcaaaaatttgtttagctctaaatttttgttgtccgtgctcaactaaccaattttgcatttcatcatatcttaacgaatatattgattgtttttcaaaatttggtaaaaatttattttttttctttttttcagcagttatcatcttaactttcctttctttttattttagtaatgaaaaagccatctgaattaaagtcttgtggcaaaatttgtagtgtttttactttttcaccagtaataggatgcgttattaattcaaattcaaaatctttattttcctttaaaaatgtataaattacattttcattttccatttgttcaattgtgcaggttgaataaataagtgaaccgcctggtttcaagttatgtttaacattatctaatatacttaattgaatttctacaagatcattaatactatccttagattgtacatatttaatttcaggcttatgttttaatacacctaatccactacaaggtgcatctactaaaattttgtcatatagttctgaatatggttttgttgcatcatggtcgaaagtggacacattctttaattttaactttttgatattttctttaattaaaccaattttatgcttatgaatatctgtagcatctacatggccagtggatgctagtaattctgccatatgacaagccttaccgccaggagcactgcatgcatctagtatggtatcgtctttttgaacatccattaaataccctactaacattgaacttttatcttggatggaaataagtccatctttaaaagctcgagattcaatcactggtttacctgtaagatgtaaacaatatggaatgagttgatcgatatccacatgatagccttcttgtaaaagcgccttacttattgtttcaacatccgtacgacttgtattcactcttactgtacttgcagattgtactagaaatgattttgcaatcttatgtgtcgtttctattccgtaatgtgtaatccaatgctcaataatccatcttggtatactatactcaatcgttatgcgttgcttttcattcttaattgtttccaatgtcggtaagtcacttttaaatatatgacgaagtatagcattaacaatgttcccattatgctggccaccacgacgtttagcaatattaactgcttcatttataattgcgtgattaggtattttatctaggaagacatattgatataaactcatccataataattgacgtacccaacctttaattctagtcttaacaaagggttttaaataaaaatctaaagtcattttacgctttattgttccataaactaattctgtaaacaatgctttatcgacagttgcaatattatattggttaatgacttcgttaatttttaaattgctataagcattatcgtttaaaatatcttgaatagactgaaatgcaaggtctcttactgattgtgtcatactaatttagtccccactaatgaatcttgtacaccacttaaatattgagcagcaagcattcgttttttcccagataattgaatatctgttaatgcaatagcatccaaagaaccagttcctacaataattgcagtcttagtgatttctataatttcacctggttctccgttttttcctttttcaatatgagattgatatagttttaaatttttattattcatagttgtataagccactggccatggtgataatccgcgaatatgattgtgtatctctttagcacttttagtccaatcgatacgttcgtcttctctgctaatattagacgcaaacgttgcttttgaatcatcttgtggaatactttcatttgaaccatctataataaaaggtaatgtttcttttaataaatctgcacctaaaaagcttaatttatcgtgcattgatcctacattatcatcatcttcaatgtcgatggccttttgagaaataatattacctgcatctaactttttcaccatatacatgattgtaatacccgtttgtacttccccatctataatggcttggtgaataggtgctccaccgcgatattttggtaataatgaggcatgtacatttacagcacctaacttagggagctttaatagactttcaggtaataattgtccaaatgctgccgttacaattaaatcaggatttaaatccataagttcatttaactcattagaatcttttaacttttcaggttgatatactggaatgtggtatgtttctgccactttctttacaggaggaggcgttaatacacgcttacgtcctactggtctgtctggttgagtaactactgcgatgacttcatattcagcgattaacatctctagtacttttgttgaaaaatctggtgttcccataaaaattatcttactcattgtcaaaatatgcctccacttctttttcagtcaatatttttatagcacgttcggtaaatggaataccatctaattgatcaatgatgtgtagtatcatcctagctacatcatcataagcagttaattcaatctcgtgaccttctaaatcatttgcttctacagttatcattttactacgttctacctcaccaaatacattaggaagattaaccgaaccttctaagtcaatgattttctcattagattctgttttgattttaggattgattaattgcaaaagtccttctgcttccatgtcaatcatagcaacacgttgacttacaccaatttgtggcgctgataaagctgatgcttcttcagaatataaagtgtcttcaatatctaataataaacgttttaaattttcatcaaaagttgttatcttttttgcttttttaaataaaacaggatgagtcgatggaactaatttctttattgccacttagaacgcctcccgaaaaaaattcatcatattattataacgtaattcaaattaaaatgcgaccttagtcttaccttcactcttcttagataactttaattgcttttaatttttttcatatctaaaataatcatgaagacattaatatattaaatagactaaggaggtataaagaatggaagtcaataaagtgatttacattatcctagctgtctttttaggtggctttggcgtacacaaattttatgctggtaaaatgatgtctggtcttcttcatttattattttgttggacaggaattcctcatattattgcaatcatcagtgcgattctgacattactaagaccagcagatgaaaatggaaacgtaacaatgtaacctgtaaatacaaaaagagttacaccacgcagctaaacgcaaatggtgcaactctttttttacattaatatttgaggattgatatcaatctttaatgataatttatttttaatatatgcttcatgataataatcatctaagtactgtaatgcatgaattaattctggctctcgcttgtatttaaccaatatttgaaaacgatgttcgttattaattctagcaattgccgctggagaaggtccaagtacgagtgctctttctgaaagatgttgcagtaaaatttgatgtacatgtttagcagcttccattacttttttcatatttttatgcgcaatagtaaaattaattaaataataataaggtggatatttacctaattttctaaattgcatttctttatgataaaacgttaaataatcatttttttgaacatcttctattgcataatgagttggattatatgtttgaataatcactttaccgggtttttcatgacgaccagcacgacctgaaacttgtgtaagtaactgatacgttctttcactcgctctaaagtcgggcaaatttaacattgtgtcggcattaagcacaccaactaatgttatatttggataatctaaaccttttgcaatcatttgtgtgcctaataaaatatcgccttttccattttcaaaatcagtcaatagcttttcatgtgcaccttttcttgacgtcgtatctacatccatacgaataatacgtgcctcttcaaattcttgttgtaaaatttcttctaccctttgtgtacctgttccaacctgtctgatatgtgggctttcacaattaggacacaggttaggaggcaagtcttgatagccgcaatagtggcattttagttggtctgtcgtcttatgataagttaacgaaatatcgcaatgtggacattgtgggacatatccacaatctcgacataacataaacgaagcataaccccgtcgatttaaaaataaaacgatttgttcatttttattcagtctatcttgaatcgcttgtcttaattcttcagagaacatggaacgattacctgaacttagttctgctctcatatcaatgatatctattgaaggtaaagcttgttgattcactctttcaggtaaagtaagtaattgatatacatttttttctgcccgtgcataagattcaagacttggtgtcgcacttcctaatattaatgggcattgatgaaattgacttcgccattctgctatgtctctagcatgataacgtggataatcttcttgtttatatgttgattcatgttcttcatcaataataataatgcctaagtttttaaatggtgcaaagatacttgatctagcacctacacttacacgtgctctgccatctctaattttttgccattcatcatatcgttcaccatttgacaaacctgaatgtaggacagctacatcatcaccaaaacgtcgcttaaagcgtaaaaccatttgtggtgtcaacgcaatttctggaacaagcatcatggcttgtttatccttttttaatacttcttcaatggcttgcaagtaaacttcagtttttcctgaacctgtgacgccgtgtaataaaaatgtacgttgtgcattgtgatctattttttctttaatttgttgaaatgcatcattttgagcagaggttaacgttcgtttttcttctttttcaaagatacgatttgcaaaaggatctcgttcaatttctgcatcatatttttctaggaaaccttttttaactagaccatctatacttgatttagaaaatcccatatcttcaagttcttttaaaaatacatttctatgatgttcttctaaaagataagcatacacatcatattgttttaatttcttttctagtaaagctaatatatcatctggattgtatccttcaacaactcgtactgcacgctgtgtttttctttttgtatgttgagataatattgtttcttcttctattaagtgttgttccagtaaacgatttaatagatttaaatgattatttttttgcgcatctttatacttataatatccgttgttatcaaagtattttaatatatcatcttcaatatcattgtgacggactattttaaatactttagtatattttgctttaatcgcacttggaagcattgcttctaacacagaaatacgttttgaaatatgataatgactcaaccattcacttaattgaataagttcaggtgttaattctggtcgaatatctcgaatttctttaattgctttcaatctatctatattgacatcttcacttggttgttgttgtatatctataacatatccttgaattgtgcgtggaccaaacggtacaacaactcttacacccacttttataaaatcttttaaatggtcaggtatgagataatcgaatttaaaatcaacactcttagaaggaatatctacaatgaccttcgcaatcattattgccacctagtttccagttcatctaaaatttgttgtgcaagttgcactttctttcctttttttatattaatacgttgtccatctttaaagtgcatagtgagttcattatcatcagattgaaatccaatggtttgatctcctacattattcgaaataatgacatcagcatttttacgttttaatttatcttgtgcataagcattaatattttgggtttcagctgcaaatccgaccaagtattgatgcgttttatgttcacctaaatatttcaaaatgtcttttgttcgtttaaaagtgacagaaagattgccatcttgtttcttcattttatgattcaatacatcggccggcgtataatctgagacggctgctgctttaacaacaatatcttgttcttcatatcgacttataactgcattaaacatttcttctgcactttctacatgaatgacttctacattctctggattatcaagttgcgttggtcctgccacaagcgtcacctttgcacctcttttagctaaagcttctgcaattgcataccccatttttccagaggaacgattagatacaaaccttactggatcaatcacttcaattgtagggcctgcagtaactaaagcatgtttcccttcaaaagaagtatgagatctatgtgatagtttattcttatttttaaaataatcattgattattttgacaatttgaagaggttcctccatacgtccctttgcaatgtacccacatgctaaaaaaccatctccaggttcaatgaaacgatatccatcgttttttaatacagaaatattatgttgcgtacgtttattttcatacatatgaacattcatagctggagcaataaatttaggggtttctgtagcaagtagcgttgatgtgacgatatcatcagcaatgcctacacttaatttggcaatagtattagcagtagcaggtgcaacaacgatgcagtctgcccaatcacctaatgctacatgttgaatttcttcaggattttcttcaataaatgtattggtatatacaggatttctactaatggcttgaaaggctaaaggtgtaacaaattcttgtgcatgattcgtgagcattactcttacatcataattcgcttgagtaagtttactagttaaatcaattgctttataagcagcaatgcctcctgtaacaactaatagaatgttcttcatgattcgactcctttagttatatttatagtcttcacttttaaatttattatacacaactaagatgaaaaactaaaaacacgggagtagaacagatttttaattcactgttctactcccgcaagattaactgattctaaaaacgcttatataagtatattttcaattgaatcagagattgcaaaaatgtttaaaagtctgaaacacatgataacttatatttcagaacaacatcttaactgataacgaaataattttatttatgcttgaaattcttcaggtacaacaggtgaaatttttccgcttgcgatttcttctagtgcttcacctacaggttttgctgaatgataaccatttagtaatgcagtttcaggcttttcgtctaattcacgtgcacgtttagcagctgttgttgcaattaaatattttgaattaatttgtgattgtaattgatttaacggtgggtttaacattatttttttgcctccaataacatttttctatatatcgcttcaacgcgttctctttttaagtgctcggcttctacaattgattgaattctttctttagctaaatgaacttcatcattaacaacgacataatcgtaaagattcatcatttctacttctttacgtgcttcatttactctgctttgaatcttttcatctgtttctgtaccgcgaccaataagacgttctttcaaatgatctaagcttggcggtgcaagaaagataaataatgcgtcaggaaatttttttcttacttgtttcgcaccttcaacttcaatttctaaaaatacatcatgaccttcagccattgtatctttaacatattgtacgggtgtcccatagtaatttcctacatattcggcatattcaataaattgatcttcttgaattaatgcttcaaattcttctttcgttttaaaaaagtaatctacaccgttaacttctccttctcgcatttgacgcgtagtcatcgagattgagtatttatatgatgtagttggatcgtcaaatatctctttacgaacagttcctttacctactcctgaaggacctgaaagaacaattagtaatcctttttcattatccatgccttacgacctctctaagctattcttctattatttaaatatgatatcacattgttgtttacattgtatagagtgtactaggataaacttaactcatgacgctctattgttaccatgttacaatataatgaatgacaaaactgaaggtggaaaaaaattatggcttatgatggcttattcacaaaaaagataatagaatcactacaatttttagtaacaggtagaattcacaaaattaatcaacctgaaaatgacacgatcattatgattattcgtcaaaatcgtaaaaaccatcatctattattatccattcatcccaacttttcaagaatgcatctcaccaataaaaagtacgacaatccctttgacccaccaatgtttgcacgtgtctttcgtaagcatttagagggaggtattgttaaatcaatacgacaaataggtaatgatcgtagagtagaaattgacattgaaagtaaagatgaaattggcgatacgatatatcgaacagtgatattggaaattatgggtaaacatagtaatttaatactagtagatgatcaatataaaattatagaaggctttaaacacttgacgccaaatacaaatcagtatcgtacagtgatgcctggtttcaaatatgaagctcctcctactcaaaacaaacgaaatccatatgatatttcaagtgatgaggtgctcaaattcgttgactttaatgccggaaaaattgctaaacaattactcaatgcgtttgaaggctttagtcctctaattacaaatgaaattacaaatcgttatccatttatgaatcaagatacgcttcctcaagcttttgaagaagtcattgaccaaacattaaaagtacccgtgccagtatttcataaaaatcatgaaacaggtaaagaagatttctattttatgaaattaaaacaattctcggatgatattgttatctatgattctttacatgatttattagatcgttattatgatgctagaggtgagcgagagcgtgtaaagcaacgtgcgaatgatttagtacgcttcgtacaacaacaattacaaaaatatcaacacaagttaagtaaacttatagacgaatacgaaagtgctaaagataaagatacacaacaattatacggtgaactcattactgctaatatttatcgtattcaacaaggtgacgcgtctataaacgttctaaattattatactaatgaagaaataacgattccattagaccctactaaatcaccatctgtgaatgctcaatactactataagcaatataaccgaatgaagacacgagaaaaagaactcgatcttcaaattgctcttacacgtgaaaatattgactattttgccaatattgaacagcaattagaacatattacagttgatgaaattgatgacattcgtgatgaattagcagaactaggatttatgaaacaacgtaaaaatactaaaaagaaaaaacaagataaaatccatttacaaacatatatatcttcagatggtgacacgattttagtaggtaaaaataataagcaaaatgattatttaacaaatcgtaaagctcaaaaatcacatctatggttccacactaaagatattccaggttcgcatgttgtcattttaaatgatgcaccgagtgagactacgataaaagaggcagcaatgcttgcgggctatttctctaaagctggaaattctggtcagataccggtagactatacagaaattaaaaatgtccataaaccttctggcgctaaaccaggatttgtcacatatgataatcaaaaaacgttatatgcaacacctgattatgaccaaatccagcatatgaagcaggataaaaattaaaaaaataaaaatccgtagatgcttttttcaagtcatctacggattttatatatcatagcgtctatttttctggtaatgcaagttggaaacttactccaaatttatcttgcacccatgcaaactcacgaaatggtggcataggagttttaggcataagtatagcgccttctttttttagaccattaaataaacgttccatttccataacatcttcaacagtgacatataaagagatggaaggattcattggtaattcttcaccattatcggcatctatcgccatgaagacttgaccatttaatgtgaaaatagaatgttgaactgtcccaggttctccaggaccgtcttctccgtattttaccattgttaaaatctcactgtttttaaataagctcgtatataaattgactgcttcttcagcctgattattaaacattaaaaatggtgtcactttaggtatttccattgtaatcctcctataatttataattaatgtctattttaaactatttttaaaaataataaaaagttagctattaagaactttgaattaaaagtagctttaattttgaaaactttccataaacagttaaaattaaataaaagtataataggaggcacttaatatgatgcattatattctaccactattagcaatggtcatcgttttattaatcggatgggtgttaattaaaatctttatacgttaagttaattatagattgatataaaaagatacatataaacatgttgattcattatttatatgtatcttttttctatatttagattttatctttttgacgtaaacgtgctttggcttttttaaagaagtcacttgtatgctcaaaagattccatttgtgcgtgatgcatatgtttaatactttctttaatagttaatacatgtgctgtttgtttaaattctttttcactgtataaaaattgattcacatgttttaaatgattataaaatgcattattatctttgtctttagccaactttatcaccctttaagcgatacttagagattatcgcgccaatccactaatgtttgaatatcattttctgaaattttgccttcttctttagctacttcaataagttcattataattacttagcgtatagaatggtagattcgcttgtttgaacatgtcgtctgctttagctagaccataagtaaagattgcaactacacctacgacttcagcccctgcttcttttaaagcttccactgcagtaattgatgacccccctgttgaaattaaatcttcaacgacaacgacttttttatttttactttgtgcgccttcaatttgattttgtttaccatgacttttacttttagatcgtacatagttcattggtaagtttagtttttcagaaatataagcagcatgtggaataccagcagtggctgttcctgaaataacctctacattaccaaaatgttctgtaataagttcacttaatccatcacgaatgtcttgacgtactttagggtaacctaatgtaatacgattatcacaatagataggtgattttatgcctgaactccatgtgaataagtcattgggtgataaacttactgcttcaatatctaataatgattttgctatgtgttttgacatattaacctaaccaactttcctttatttttgtataactctcttgtggatgctcactttgagttattgggcgacccactacaatgtgagttgaacctaattgtttcgcgtcttctggagttgtaatacgtttttgatcattcaccgctgcacctttaggtctgataccaggcgtcacttttaaaaattcagaacccagggactttgtcagtaatttagcttctaatggcgaacatactacgccatctaatcctgactcttgcgctaattttgcataattcaacactgcttcttcaatagacgtttggatattttgttcttgatgaagcatttcttcagtcgttgatgttaattgagtcactgctattattttagtagtttcattatatttacgtaacccttttacagcatgtttcatcatttcagttccaccagcagcatgcacgttaactaaatcaacatttaacttacctaaaccctccatagctttttgaactgtattaggaatatcgtgtaacttaaggtctaaaaatatatcatgtccacgttcttttattttcttaattaaagctggtccagtttgataatataattccattcctacttttacaaaaagtggttcatcaaattgatctaaaaaatcaagaacatgattctcagaatcaaaatctaacgctataattggtaaatctctcattcattaaactcctttaaataactcacttttattttaaaaagaagcgacttgtgcttaaacataaagcaagttaacacataagtcgcttataattatggcattacatatttctcattgaaaatgtcatactttcaatgacatttgttaatgcacttgcagtatctaatgaagttaaacatggcactccgttttctacagtagtacgtcgaatttggaagccatctctttcaacttctttaccttttgtcattgtgttaataacaatttgtacatccccattttgaatacgtgttaataaatcatcttctccaccgattttacccacaacttcaacagggatattgtgcgcttctaatttttgtgcagtaccttgtgtagctaagattttataacctacttcatttaaacggtgagcaatatcaacgatttcttctttatctttatcgcttactgtcattaatactgtaccatgatcttttacttctaccccactacctgttaaacctttatataaagctttttcaagtgttaaatctttacccatcacttcaccggtagatttcatttcaggtccaagtgtaatgtcaacattttttaatttattaaaactaaataccggtgctttaacaaacacaccctctgaatatggttgaataccttgttgatagcctaaatctttaagctttgtgcccattatcgcttgcatggcaagttgtgccatttgaatatcagtaattttacttaagaaaggcactgtacgacttgcacgtgggttaacttctaatacatacacaccatcatgtgcaataacgaattgaatattgatgagtcctacaatgtttaatcctttagctaatttaattgtataatcttcgagtgtttttatttcttcatcgctcaatgtttgtggtggatacactgcaattgaatcaccgctatgaacacctgcacgttcaatatgctccataataccaggaataataactgtttcaccatcagaaattgcatcgacttctatttctttacctgttaaatatctatccactaatactggatgttctggacttgctttaacagcttgctccatataattttctaattctgcatcactatttacaatctccatggcacgaccacctaatacataagaaggtcttacaactactggataaccaatttcacgtgcattttctaatgcttctttaggagaagttgctgttttacctttaggttgtggaacatcaatttttcttaaaagtgcttcaaattcttttctatcttctgcacgatttaaatcttctagtgatgttcctaagattttcacaccatgtttagctaatttatcagctaaattgattgctgtttgaccgccaaattgaactactacacctttaggttgctctaaattaataatattcattacatcttcttcagttagcggttcaaaatataatttatctgaaattgaaaagtctgttgatactgtctctggattattattaacaataatcgcttcatatccggcattttgaattgcccaaacggcatgtactgtcgcataatcaaactctacaccttgtccgatacgtattggtccagaacctaatactaaaattttctctttatctgtaactacagattcattttctgtttcatatgttccgtaataatatggtgtagatgattcaaattctgctgcacacgtgtctaccattttatatacaggtttaatatcattatcttgacgtaattgatatacttcttcttctgtcatatcaaagcgatgagcaatcactttatcactgaaaccataatcttttgcatatttaagatattctaagtctcctggatgcgctttaagttcatgttcaatatgaataatattaaggaatttatttaagaagaaataatcaattttagtcatgtcatgaatttcttgtaatgatgtgccacgtcgaatcgcttcaccaataaagaataaacgctcatcatcttgatgactgatacgttctttaatgtaatctaagtcataattttcaccatttggtaaaccaagatgatgaacaccatattctaatgaacgaatcgcttttaataatgattcttcatatgtacgaccaatagccatcacttcaccagtagccttcatttgcgttcctaattcacgttcccctttttcaaatttatcaaatggaaaacgtggaatttttgaaatgacataatcaagtgttggttcaaaagcagcataagatgttccagttataggatttagcatctcatctaatgttaaaccaaccgcaattttagccgccaatttagcaattggatagcctgttgcttttgatgctagtgcagatgaacgagacacacgtggattaacttcaatgatgtaataatttaaggaatatggatctaaagccagctgtacattacaaccaccttcaatacctaaagcacgaatcactttaagcgatacatcacgtaacatttggtattcaacatctgatagtgtctgactaggagctacaaccactgaatctccagtatggatacctactgggtcaatattttccatattacatactacaatggcattgtcatttttatcacgcataacttcatattcaatttctttatatcctgctattgatttttcaattaaacattgagtcgctggactataatgtaatccattacttacaacttcttttaattcttcatcattatgacagataccaccaccagtacctcccattgtaaaggcagggcgtacaattaatggatatcccacttgttctttgaatgcaaatgcttgttccacagtatttactatatcactttcaggtactggaacatctaaatcattcatcaatgatcggaataattctctatcttctgcttgttgtatagattctaattttgtacctaataactctacattatttgcttttaatacaccgctatcatgtaattgtattgccatattcaaacctgtttgtccacctaatgtaggtaataatgcatcaggttgttctttacgaatgatacgtgcaataaagtcatgagttaaaggttcaatatatactttatctgcaatttctttatcagtcataatggttgcaggatttgagttcactaaaataacacggtatccttcttcttttaaagcaagacacgcttgtgttccagcatagtcaaattctgcagcttgtccaataatgataggacctgaaccaattactaaaatcgttttaatatcgtcacgtttaggcattcgttttactctcctttttattatctttaaaatctctcatcatatctaagaactcatcaaataagtaatttgagtcacttgggcctggtcttgcctctggatgatattgcactgaaaaggctggtaatgttttatgtcttaatccttcaaccgtaccatcatttaaagcaatatgtgtcacttctaaatctgtattttttaaagaatctttatcaatagcataaccgtgattttgacttgtgatatctactttacctgtgcgtaaatcttttacaggatgattcgcaccacgatgtccgaacttcatcttaaatgctttggcgccttgagataatgcaaataactgatgaccaagacaaataccaaagaatggtatatttcctaaaacacctttaatcatatctaaagcaacatcaacttcttctggatctccaggtccatttgaaagcatgacaccatctggtgacattgctaatatttcctctgctgaagtatcataaggtactacagtaacattacatcctcttgaattaagctctctaacaatattttgctttttaccaaagtctaataacacgacgcttaaatctgaacctgttgatacatacggtgtttttgttgacacagtagtcacctcatcacgaggtaactctgcagtttttaagttagctgcaagcgattcaatttcctctttattgtcggtaaatcctgcttttaatacaccatattttctaatttttctagtaatactacgcgtatctacccctgaaataccaggaatatgatattgaacaagcacttcatgtaatgttttttgttttctaaaattacttggatgcgtacttgcttccttaactactaccccatttaatgtaggtgtaagtgattcaaaatcgtctctattaataccataatttccaattaaaggataagtaaatgtaacaatttgaccagtatatgatggatcagaaatcgtttcttgatatccagtcatcgctgtattaaatacaatttcaccgattgataattgatctgaccctaatttatatccttcataatatgaaccatcttcaaatacgagatatctacgttcaaacattttacttgtcctccttaaatttaacttcaccctcaaccattgttaaaacagggttaccatatactttatatcctataaatggtgtattatctgctttagataagaaatcttcaccacgaatttctctttcttcatctaaattgataattgttaaatctgcatagctgccttcttctaattttccataaggtaaatcaaatatttgtgctggcttaattgttaagtaatcaacaagttgttgtaatgaccagtctccttttttaacaaaatgagtatataataatgggaaggccgtttcacttcctacaataccaaatggtgcttttgtcattggctgagctttttcttctttggcatgaggcgcgtgatctgtagcaatacaatcaatggtaccatctagtaatccttctaataatgcatctctatcttctttacttcttaatggtggattcattttaaaaatggcattatcgcctggaacatcatcttcagttaataacagatgatgtggtgtcacttcagctgtaacatgaatgcctgctgctttagcatcacgaattgctcttacactttcttttgttgaaacgtggcacacgtgatagtgacaattagctgcttctgctaataaaacgtctcgtgcaatttgtacagattcacaaatatttggaatgccaggaatacctaattcttcactacgtttaccttgatgcattgcaccaccataaattaagctattatcttcacaatgagcaacaactgctttatttaattttgctgcttgttgcatcgcttcatacatcattgctgattcctgaacacccacaccatcatctgtaaatgcaaatgcaccctcttttgcaagtgcttcaaaatcaacatgctctttaccagcttgacgaatggtaattgatgcataaggcaagacacggacttgtgcattttctttaattaatgattgcaactgatccatgtgttctactgtatcaggtacaggacgtgtattaggcattggacatactgttgtaaatcctccacgtgcagctgattttgttccagtttcaattgtttccttatgttccccacctggttctcttaaatgtacatgcacatctactagacctggtgctacaaattgaccatttgcatcaatgacttcatcagtaccttcatcaatattaatattttcattcatttccttgatatattgtccatcaattaaaattgacgttgatttaagttcaccattgtctaaaattttagcattttttataagtttcataattattctccttttcttgataaaagtttatctattacagccattcttaaatacattccattttccatttgtttaaagattcttgacttaggtgcttcaactagttcactatcgatttctacgccacgatttactggagcaggatgcatcactatcgcatcatcttttaaacgacgatacctttctttagttaacccatattgttcatgataatgatcagctttaaagtttgcttcatcagtaataccatgtctttcatgttgaactcttaaaagcataataatatcaactttatcaatcacatcatcaatatttacataaggagcatctaatgtttcatctacccattcatttggacttgagaacatcaccttagcaccaagcgaggttaaacttgtataattacttctcgctacacgagaatttttaatatctccacatattaaaatatttaatccttcaaatgtttcatattcttcataaatcgtcattatatccaataagctttgagtaggatgctgaccactaccatctccagcatttgcaatcggaatatttaaattttctagttcttcgtaatatgcattttgaggatgtctaataactaataaattgacgccaatactctctaacgttttacaagtgtcataaagcgattcccctttttgtactgaagaagtacttgtttcaaagttaacttgtttcaatccaagattaagttcagctacttcaaaactgcattttgtgcgtgttgaattttcaaagaataagttagatacatatttcccttcatactgagggacagtttcttttcctgatttaaaacgactcgctgtttgaataagattaaaaatatcatcgtttgttaaatattccattgaaaataaatgttccatgatgtgcctcctaaaagatcctcttttatttaatgtctgattcttctttttcttttggcaaaataagatttaatatgattcctgataatgctgctaaagccatgccttcaatttgtaggttcacaccaagactttttaaattgataagtaaatttccaataccgactactagtactactgacgcaataactaaattacgattactagcaaaatcaacacgactttctaccaacattctaagtccacttgctgcaataataccgaataataagatagatacaccacccatcactggtgtaggaattgatgaaattaatgctgagaacttacctataaatgataagataattgcaatcactgctgcaccaccaatgacataaatactatatatttttgtaattgcgagcacaccaatattttcaccataagttgtactaggcggtcctccaataatactagcaaacattgttgaaacgccatcacctataattgaacgatgtaaaccaggattttcaaagaaattacgtcctacaattttattaatcaccatttgatgaccaatatgttcactgactgttacaaatactataggcaacatgactaaaataagtccgatatgtatcgatggaacataatctttaaatggtaaatatatatctggaaaatctagccaactggctttagcaattggtttgaaattaacaatgcctacaaaaattgacacaatataacctacaataattcctattaacacaggaataagtgaaaggaaacctttaaaaaatccttgaacaataatagttactagtaaggttactaatgcgactaataaatagcttaaattgtaacccttcatatctcctgaattctcatacattgccatgtttactgctgttggtgcgagacttaatccaatgaccataataactggaccaacaacaactggtggtaaaagatgcatcaaccaaccggtaccacttaattttatgaaaataccaataatgatatacattacgccactagcaaataatgcgacaagcatatctcctaaactgtgcgtacttaaccccgtaataattggagtaataaatgcaaagcttgaacctaaataggcaggtatttttgctttagtaattaatatgtatagtaatgttcctatacccgatgctaataatgcagcagaaataggtaaccctgttaaaaatggaacaaggacagttgacccaaacattgcaaatagatgttgtaagcttaaaaacgcccattgtgctggttttggtttatcttttacatctagtactggtttgacagtacgttcaaacatttgctcattttccatgaaatgttcttcctttctaaaaaagtctctttacactatggtaaagagactaaaataaattaatgaaatattataaaaagcttctttaagttttttataacatgacataggaaaagtatttaatttaagtgagacatatcatctatccatttaataaatacattacacgctcaccattacatacttcacctttttcagtctctcgtactggtttaaaaggttagttattcaattattactgcatttctatcatctatttcttcaagataaacagatactgcttcatcttttgcagtaggtatattctttccaacaaagtctgctctaattggcagttcacgatggccacgatccacaagggcagcgaggccaatctttataggtcgagaatgtaataaaattgcatctaaagatgctctaactgttcgtccagtataaagtacatcatcaataataatcactatcttatctgtaacatcttgatcaatttcaatggcatctttagtgataggctttttcgagttttcaatatcatctctaaaatgagtaatgtcaatcgtacctgttggaactacatgatgttcaatttgtttaattttttcttgaatacgacgtgctaaaaattcgcctcttgtcttaatacctaaaagaacaagttgttcagttcctttattatattctagaatttcatgtgctatacgtgtaacagtacgttgtatagccgctttgtccataataatacgttctgacatgattacacctcttaaaagaaaaaacctcatgccttttataaagacatgaggtttaatgtatataaaaatattttatatgattagtctgatagtaatcgaacaattgaagttaatcatatttatatcattagtcaccctgtcttttgagcctctctggactctttttaaaagacactgttttgtttaattttaactgttattagcttaaatctttttagttcataagtcaatatgctttcttttaatttacgactttattctctaattttatgattctcttaatcgaatatcttctaatagcgattgaaacgcttgaggtaactcagcatgacgttcaatatattcatgagtgacaggatgtttaaaaccaataactccagcatgtaacgcttgtccaccaatatctaatgtttttctaggaccatatttaggatctccaacaagtgggaacccaatatatttcatatgaacacgaatttgatgagtacgccctgtttctaattgacattcaatcaatgtatagtcattaaaatgctctaatacattaaaatgagtcactgcttcttttccatcatcaacaacatccatagattgacggtcttttttgtttctgcctattggagcatcaattgttccataatcatgaggaatattaccatgtactaaagctgtatacttacgctttactgttttatccataagttgttctactagaccacgatgtgctacatcatttttagctaccataagtaacccagacgtatctttatcaatacgatgaacaataccaggacgtatctctccattgatacctgataaatctttaatttgatacattaatccattaactaatgtacctgtataatgacctggtgaagggtgtacaaccatacctttaggtttataaacaatggctacatctttatcttcataataaatatctaaattgaggttctccggtaaaatatcggcttcaaccacttctttttcagttacttgaatctcatcatttaatttaactttataatttgatttgattattttaccattaacagtgactaaatcatttttaatccaatcttgaaattgacttctagaccactcactattgaaatcagataataatttatcaatacgctgacctacgagtgcttcatcttctattttatatttatacgtttccactacgtgccctcctattcttttttggttgcatccttaaccaatgcaataatgacaaaaataacaccaattgttaagcttgaatctgcgatattaaaaattggaaaatcatatccaaaaatatttgtatcaatgaaatcaacaacttcaccattgaataaacgatcgataaagttacctaatgcacctgcaaataataagctaattgcaacttgcataaacgcattatatttagtttctttaatataaaatataataagtacagctaaaataataagagtaataatatagaaaaatcccattttaccacttaaaatcccccatgctgcaccattatttctatgtgaggtaatatttaaaaaatgaggaatcacttcataagaatcaccaatgttcattgttgctgtaattatttttttagttaattggtctataattaaaatcacgatggctactattaaagataaaccaatataatatttctttttcattcatgtgcctccattcagccctcaactctttgacaacactctacattatagcctactacttagcataaaaaaagctacaatcttctatgtcatatttgtgttacttttaggatgaatataattaaattgatcgacttgataaacatctacaaaacgtgttgtaatttcgtaaggttttctgaaattcatatcagagactattaaagagccatcattattgacttgttctacataagcaacatgtccatgttttccttttggataatgtaaaatagaacccttagttggattttcattgactgtatatccttgtttcttagccttattagcccaatatttagcgtcaccccattggttacttattaaatgatgatcttcttttactcgatcaaatacatagtaagtacattgacctttagcgtatgtgttatatttcataggatttttttcccaaaaatgaattgtaggttcagtcatatcttgattgtctagaccatcaaaaattgcaccgcccgtaaatatcatgcatacaaataccattaaaaaaatccattttttcatttcatcactctacctttataaaattaaatctaaattggataccatctgggcctttaatattgatatgatgtgtttctggataatgaaagtcaacgatagatagaccataagtatgttcattatctattcgctttatttttgaattccattgattcattgaaagatgacaataatattgttcagaagctaaataaaaagattcatcatctaaatatgcagaaggtactagtccaaaatagtttagataatactctcttacttcatttaatcgaatggtttttaaactaatattcccaattttactatcattaggtaaaccttgccatccgatggttgatgcatatggtaataatgaagaaacatcgagtggcttaatatcgagtctaatccattcactttcttgtttccaatcagaaatcgatttatcaacataaaacttaaacatatgaccttctggatcttcgacaaaaataaatgtacatacgttttgttctccaccattaattggtaactcatagtcatttaacttttcgattagatctgccagatggtgtgtattggataattgaactcctatataaaataaaccagcttcttgagataaaggatttcgtccagattttatctctcttaaagtaatataatggtgacgatctccaatttgatatttgacagccgttaatgtctcttccacctttttaaatcctaataattcttcatagaacggttgtaaagtacgtaaatctcttacatttaaagtgataccattaataaaatgtgcatcattatcatgaaacatagggtacctcctaaattttaaaatctctctttcaatttaaaatagctacgattaatgattattctataataaaataattaaaattttatcagtcttaatgcgtaatattcaactatttaggctaaaaaaagctttcgatagaaagaacttcatggctcttccatcgaaaacttttaaatacataaagtatactattttttagctaaaaatttattgtatattcttgcaccaacaaatgcgccaatcattgcaccagtagtcatagcaagattagtaaaaattttattaacaggatcttgtttatcttcttcttcattagctaaatgattcatatggtgtttaaacacatccatcacaaacttatgtgcattggcttgagtaaacttataaactccccatggtaatgttggttcatattcatgtaatgctacaataccttcattagtatctaatatacgcctaaattcaaatcgcgcattaccgccgtctttagccattgctaaatctccaccaacaattttatatacaatcatttcactcgtagaatcatgattatgtcgtgtcatttttaaaatgaatttctttattaatggtaattgaatattaaattcatgctcattaatggtaccatctattaaatgaagcgtaatatcatttataaattctgcatattctcttgttacatcacgcattgaataactttcaggaattttaaaacgcgttattgctctaacatctttcacttcatttttcttatcttgctttgatttaggtttagactgttttgtagttattgtttgttgttcatcttgttcttctttcagtgcttttcttacactttcttcataattcattttccctaatgatatttcaggttttatacgctcaggctgtggaatcatatcatgcactaaactatccataagtgggtataccatttctttaggtacttgcgaaatcagtctaacccaaaatcgacttaaccaaataggaataattggtaaattcaacgtaggtaaacgtttatcaagaatagccgctgtacgttcaaataattcttgataattcattaccttaggtcctgtaatatcaaatgcttcattttcttgtggagaacgttcaactaacatagctaatttatcaataacatcattaatagatactggcgcaatcatattgtgagcccagttcggtagaatcattgctggcaaacgctctatcattctttttaaaataggatatgagctaccttttgaacctataattagaccagcacgtaatgtgcttacagggatgtcataatatcctaatattttttcacattctaaccgactttttaagtgaggtgataactgagtatcatttgggataataccactcataaatataatatgtttaacaccttgcttttttgctgcacgtccaaaattatcagctagtagtgcatccatatcttcgaaattcgcttgtgtaagtttagcacttggcatcattgaatgaacaagatatatcgcagtatctataccttccattacctcagttatagcatctaaatcaaataaatccgctgatttccaagttacatttctttcattttttttattttgagcatttcttgatattgcgataatctcatgattatcttttaatttatcttttaaatgactaccgatatatccagaagccccagttagtaaaatcttgcccataattttatccctcttcctatatctatcataaacatacgagaaatattccatcacttattatgtgttataacctagttcctcttcatctaaacttgaaactctattcagctatattttcaaactattattatttaatatttatatactttaaaaaaaacgctcgtaatccttaattaggttacaagcgttctatctttattgaattaaactaaagtttttacgacttcttgacaacgtggacataaatgatcaagttcaccaacagatcctaatgcttcactataattccaacatctttcacatttttcacctgaagcatggtcaatacgaatgtcaccatgttgatattcatttccattgtctactttttcagtcacttcaacttgagagacgataaataattgttgtaagtcattaaattgttgtaaaaattctgcagctttaaagtgatcattgtttccaatcactactttagcttcaagagatttaccgataactttttcattacgtgctgcttctaatgcacggtttacatcatcacgtaatgacataaattgattccatttatctaataactcttgatcaacgtccacaacttttggcatatctgctaaatgaacactttcttctttaacatgtggtgtatgagaccatacttcttcggcagtgtgtactaaaataggagcgagtaatttggtcatatctactaaaatttgatacaacactgtttgcatgctacgacgtttatgtgcgtctttttgttcaatatacagaatatctttaccataatctaaatagaagttacttaattcaacattgataaagttttgaacttcttgataaatatttaagtaatcaaaattatcatagtgattaatagtactagcagtgaattcacgtaagcgattcaataagtagcgatctacttctaataattcatgttcaggtacactgtctgtttcaggattaaagtcgttaatattacctaacataaatcttaaagtatttctgatttttctataaacatcagacgtttgttttaaaatttcatctgaaatacgtacatctgctaaatagtctgtactacttacccataatcgtgcaatatctgcacctttttgttttactacttgattaggcacgataacgttacctaaagatttactcatttttttaccttcgccatccattacgaaaccatgtgacaataagaatttataaggcgcttgtcccctagtcgcaactgctgtagtaattgaagagttaaaccaaccacgatattggtcactaccttcaaaatataaatcggctgggaaatgcaattctggacgagtttctaacacgcctctatgagatgaaccagagtcaaaccaaacatccataatatctgtttctttagtaaattctccattagggcttccaggatgtgtgaatccttcaggtaataaatctttagcttctctttcaaaccaaacatttgagccatattcttcaaataaatcagctacatgattgactgtttcttttgtcataataatatcgccattttcagcgtaaaatacaggcaatggtacaccccatacacgttgacgagaaatcacccattcaccacggtcacgaatcatattataaatacgtgttttaccccaatctactttaaaatcagtctcttcaatcgcatctaagatatcttgtctcactttattaattgaagcaaaccattgaggtgttgcacggaaaataaccggttttttagtacgccaatcatgcggataactatgcgtaataaagtctaattttaataaggcacctttatcagttaaaaggtctgttacagctttatttgctttatcatagaacataccttcaaattgtccgccttcttctgtgaagacacctttatcatccaaaggactaatgacaggtaaatcgtatttttgacctacaacatagtcatcttccccgtgaccaggggcagtgtgtacacaaccagtaccagcatcagttgttacatgaccaccattaatgactaatgacactcgatctatgaaaggatgttgtgtttcaacatactctaactcttttcctgtaaattctttttccaattgaatagtatctttatcccaacctaatgcttcagaaacactttcagctaaagcttcagcaatcacatatttcttaccatttacattatattgaccatatttcaagtctggatgaactgtaattgctacgttagaaggtaatgtccaaggtgtagttgtccagataataaattgagcatcctcatcaatagtaccttttgaatctttaacatcaaaggctacataaatagatgctgaacgtttatcatgatattcaatttcagcttcagcaagtgaagattcacttgatggtgaccaatatactggttttttacctttataaattaaacctttatcagccatttcgccaaacaaacgaatttgagctgcttcatattcaggtttaagagtaatatatggattattaaagtccccacgtacacctaaacgtttaaaatcttgtttttgaagttcaacttgttctaaagcaaattctttacatttttctctaaactcagcaattgacatttttttgcgatcaacgccttttttagtcaatgcttgttcaattggtaagccatgtgtgtcccatcctggaacgtaaggtgagtaaaatccttgcatcgttttataacgtacaataatatctttaataattttatttaatgcatgtcccatgtgaagattaccatttgcataaggtgggccatcatgcaaaataaatgattgatttctttcatttttctctaaagctttttgataatgattatttgcttcccattgctcttgaatttttggctctttattaggtaaacctcctcgcattggaaagtcggttttaggcattaataaagtttctttgtaattcatattttccactccttaaatataaaaagaactctaagttcaattaatagggacgggaaacccgcggtaccacccttcttaactcaacttagagttctcttcttaatattataaaattttaatttgccagtgatataaaaaatagacttatattaggcttgcaccgtgtcctaactcgctgtgaaaagtttattattttttacgtgtctgacattttattaactatttatttgatgatgattcactacttgaaacatccttattttcagatgtagacttacttgtattagttgtttcattagaattgattgactgattttcctcatttgatactgtctcagttgtttcactcattggagtttcattattcgcatttggatttacatcttgtggatttaaatgctgtatgttttcttgtgtcacttgttctgcatcaaaatcataatttaataagtaatcccaatcatcatttttcaataaatctagctgtgcttctacaagcatacgaaatcttgatctaaatattttagattgacgtttcatatcttcagtttggaaagataaatgacgtgctttttcaatagcatcatttacaatcacatcagcttgcgcttttgctttagagataattgcttctgattcttttgtagcagcaatttttgtttgttctccagcttgttgagcttgaataagcgcatcacttactgattgatgaacatcttgataagatttaatattagtatctctctcttcaagcactttttcaagttgttttttttcttctttaagtctttcaatctcattacttaattgagttaaaaaatcgctaacttcagcaggctccaaaccatttttcactcttgtaaattccttatttcttatttcattaggtgtaaaagccatctgttatcctccttaaaacaaaccatcataaaggtgtttttattatttatcaatcaatatcatttacttaaatagtgtttgatacgttatatgaactttttcttttttagttttgccacctatatcaataattcgagcacgtccaaatccttgaatagagagcaaatcattgttttgaagttgaaaatcgggagaatcgattaaagtatgattcacttttacccgttttttttcaattaattgtttagcaattgatctagattttcgaatcatttcttttaaaacgacatctaatcttaaagcactgactgtactatgatgaatattccaattctcttttgattgtatcatatctttaaatggaatagaatcaagtttgactgtagcacctttaatctttgttaattccatcataatatatgattccaattgctttgtcaaaacaaactgaatcgtatcaccaacaagtatatctcctacttgttctctttctatacctaaagacattaaagttccaagtacatgttgatgttgaatagacacaaatttctcaggataattaatttggattaatacttcttcaaaatcaccttcagtaggttcaaaataactaggcgcaataattgctctctttctttctgccgattgaccaccgaaatagctcactttcatatcttcaaaactaccgacgatgacttctaatatatattgtcctctaggatctaaaaatgaagtcaatacaggtgcatattgttgattaacttgttcacatttatctaataattgatcaataagtggttgttcttcatttctaaagtgctgataaatatcgatgattaacgcctcctcttttaagtgttaaagagcctgagacattatgcatatcacaggctctactaacttattataaaattattttagtattaaataatttaatatcatatcaaaaatactttgcaatccatattgaaataatacaagtacaaataatgctacaattgatgaaatatcaatcataccaatgggtggaataatctttctaaatggctctaagaaaggttcatatatcttacttaaaaatgatccaaatttagattctctaattgttggaacccatgaagtaaagaaataaataatcattccccaataataaatttgaactagtaataatataaagttaaatatactagctaatataccaacatccatatattatattctactccttaaattattcgtaatgttgttgtgtattcatctgttcaaggtgatcggtaatactacctgccacctcaacattatcaggtgtacaaaggaagatatcagcacctacacgttgtatatctccgccaatggcataaactgttccgcttaagaagtcaataatacgtttcgctgatactttatcaatacgttgtaagttaactaatgtcgcacgacgatttttaagttcatctgcaatgtcttgagtatctgaaaatacacgaggttcaaataagcacatttttgaattttcgtaattactataacctgtaccagctgattgattcatagtaacaacattttttgaattagacttatttgatgtatttcccatacgataattcctttcttcagtattgtaattttttgatactttcttttgaggtacagtttttaagtgattttgattattctgtgttctttcaataggttgctgttgcatattacgattttgattttcttcattttgtgttacacgctgttgtctttcagcagggctttcgacttcttcttcatcttccattaggaaaaaattattaaataaatccttgatagccacggggctcactcctcttctccaacaagtttagtccctattcttataaatgtagcaccttcttctacagcaatagtataatcattactcattcccatagataaatattcacatggtgcataattcaatttaaggtttttaatttcatctcgttttaatctcaattgtttaaataactgatgtatgtagtccttatcatcggtataaggcgccattgtcattaatccaacaattttaatattgtcgaatgctttaatttgttcaataaaatcattaacttcactaagcgcaataccatgtttagtttcttcaccagaaacattcacttggataaagcatgaaatagtgtgagttgctcttttattaatttcttttgctaaactcaaacgatctagtgcatgtaaataatcgatgtcattaatcacatcttttacttttctagactgcagtgaaccgataaaatgcattgtaacatctttaggtaaggtttgttttttttctagaaaaccttctaatctattttctccaaagtgtcttaaaccagcatcatacgcttcttttgctcggtctattgtaacatattttgttactgcaatcacgtttggagcggtcttaatcacacttttttcaagatgatgattaatttccgcttgtattttttctaaattttctgtcactttcattatatatcaacctcttaactttgtaatgacataaaggattatagtgatataactgcattacactacacttctcctttttgacctataaatgctagcatcctgccagttttacctttttcaacacgataagagaaaaaaagcgataagtcttctgatgtagtgtattttgtaatattaatattttcagctggtacgccactattttttaataataaagcgttagctaattttaaatcaataccatgtcgatcagtatctcgtgtttcaatatatttgtcagaattaataggcaatgtttcaaatttctttttaatatcatcatttatttcataggttgaagaagtcgctggacctatgactacatttaaatcttgatagtcaaattctacatatttaagcatttctactactatttgaccaaatgttcctctccaccccgcatgagctagagcgataaaatgatgtttttcactataaaaatatacaggtacacaatcagcataacacatcgttaataatatatctgaatcataagtgtacataccatcaattccatataattcattacctaatgccttaatattagcgccacaatgtgctttagtaatgtgagcgatattattttcgtgtgtttgaataggaaaaacccattgttttgtaggaaagttgatagcattagctaatatctcttgatgatgcgtcacatgactaggttcatcatcaatataacgtgccatattaaatgtatctcttggatatggactctttccatcttcacgtgtagtaaaaccgagtgttaactgatcatattgtgatgtataactcaaataatgtggctgttttataaatttttccacgttgtgaaaaccaccttcacttttaagaataatcatatctagactattgttttatattttatctgcatttcgattaaaagatgtatataaatgtattatataacatatttctttttaaattaaacaaaataaaaagagcagcattctcctcagaaatcactgctccttattttatatttatgctttaatattagcgtctagttcttctagaacgtctttcttctctattacgaataaagctaggaatatcatcatctttagtagtatgacttctttcgcttagaccatcagaaggacgtgaattagatgtactatgtgtgaatgagtcttcttttggtgcactttgagttgatgtactagaagttgcacttgaaccaaaaccagtacttgacgctttacgtccttgcgatgttggtttgtcttcaaatccagttgcgattactgttacaacaatttcatcttgtaattctggattaattacagtaccgaaaatcatatttacatcttcatctgctgcatcttgtacaatatcagctgcttcttgagcttcgaataaagataaagattcgccacctgtaatgttcattaacacaccttgagcaccaacaattgatgtttcaagtaatggagatgaaatagcttttttagcagcttccactgctctattttcgcctgaagatacaccaatacccattaatgcagaaccttggttagacataattgtcttaacgtcagcaaagtctaagttcacttcacctgatacagcgattaaatcagagataccttgaacaccttgacgtaaaacattatctgcttctttaaatgcttccatcataggagttgatttatcaacaatatctaataaacgatcgttagggataacgattaatgtatcaactgccgctttcatagcttcaacacctgctgctgcttgtgtagaacgtttacgtccttcaaagccaaatggacgagttacaacacccactgttaatgctcccatttctttagcaattttagcaactactggtgcagcacctgtaccagtaccgccgcccataccagcagtaacgaataccatatcagcgccttgaatagcatcttcaatttgttcacgtgattcttcagcagctttttttccaatttctggatttgcacctgcacctaaaccacgtgttaatttttcaccgatttgtattttagattctgctttagataagtttaaagcttgcccatcagtgttaatagcaataaattcaacattgttcattccatgatcaatcatgcggttaacagcgttgttaccgccgccacctacaccgatgacttttaatgtcgccaaatgattaaatccttgttcaaattctaacatttatttttcctcctagtcttaatggccaattattcaaatagagatttcataagctttttaaatttgctttcttctttatcagatttttcatgttcatcatcataatgatgtgttccatcttgatggttgttttcgtcatacgtttcataatcatcatgtttctccgctttttcacgtacttccggctgatgattttcgtcagtgtcttcgtttttattagatttacgtttaaaccagtcaaagccacctgattttgaagtatgattgtgttcgtcattttcaatgacttcttcttcaaattcatcattatcttgataatttattgtaacataatctaataattcatcaaatgtgatactactagatattgtagaaatcgctgaagtaaattcaggttttctaattcccatttgagaaggtgtatggattcttattttttcattaaccattgtacttagtaattctttaacgcccaataagtttgaagaaccacctgtaacaatgaatccaccatttactttagttaatcctaaatctaccaacacatcaaatacttcatcaaagatatcttgcactgttctttcaataactgcacttaaatctttttgagtatactctactaattcgtcactatctacctgatcaacactgaaaacgtcttgatcagacgctgattgtgtataagcatgtccatattgatgtttaattttttcagctgtttcatatgtagtgtttaattcttctgcgatatcatctgtaatatcacgtccagctaattcaattgaatcggcatctacaagttcaccgcgttcataaaaggcgatttgagtgagatcttcaccaatatcaattacacatgcacctaattctttttcagttgcagataaaatagagccatagttataagcatctgaatagacgtccaatacatctactccacaagattctacacatttaatcatattaattagaattgacttgtgaattgcaataacacctgcttctacttttaacgagtgtcttgcaatgagttctttaggatccgaaacctcgttatctccatctacaatgaatctaatcggaaacacatcaataacttctgtatcaggtacatcatttttttgacgtataccttccaatactgtttcaatatgtgatccactaatttctgtatcttcgtaaaaatcaatttcgttttcttcatcgtacacttcagtaccaatgataggtaattttaagaaaacttcttttatatccacacctgatgcgatagaagcttttttaattgtatctttaattgcttgtttcgcaatatcaaaatcatcaatcaatccattcttaataccgctagtgtaggtttgccctgtacctatcacattaataccattgtgaaatttttcgcctactattgttttaacacttgatgaaccaatatctatgcttacatagtaatgttcctccatagataggcacctcctgacaaaatactattaaaatacactatatttagtttacaatacgtcgtttagcttgtgaactataaacacatattattatcgaaattttttaattatttgtatccgattgttcgcttattttatttaatgcactttgtaattcattttttgcttctgtttcttgctgtgttttttgacgaacattttgatcggacttagaattaatactgctattttcattatatggaataaatgatgctcctacagataaatcaatatatccttgtgtttttaattgacctgaactatcttttgcaagagattgagacatttgaggataatactcgattttgttagctagagtattgatgtctcctactacttgcatgccatctttcatatataaaaggactcgattttgttgattctgtaaaggtgcatattttatttctgaaatcatatctctcgtttcattagacattttagataatgctttcgtgatactatttaaattgtcacctttaaaatcttctaacacaggtgcactattcgcaatatcaccattataattgtctaattttttatttccttcaattattggcacatatttatttttatcttttacaatacctactaaattattttcaataattttaacatttaaagtattaggcaactgtttattaatctgaacatctttgattaatgaatttttctttaaattattgatagctttgcttttactaaaagtataaatgcgtgatccttttttgatatttaattctttttcaacttgactatcacttacattatgattaccactaatattaacatgagaaattctacttaatggtgtaaacatatatagtagaaataatataattaaaagtattaaagtagtaacaataatatattgaatacgtttttgtcgctttcttttatctatcttttgttgttctcgtttttcagctaccgttaagtgactatatttatcattttgaaatttattgcgtttttctcttaaccttgtttttacttctttctttaaattttcacctttatttttcgaagaatttaaagatttatttgaccttctatcatttgaaagattcttttctttttggagtctatcttttgatttaacatcatctttaatttttttatttttatcattttctaattcagttttgtctttatcaaatgaacgcttgatagaacgaatctttttatttctattgccccttgtatcatccaattacttcacatcctttaattaagatggtaggtatgcacggaaactttcaataaatctttcgccacgttcttcaaatgttttatattgatcccaacttgcacatgctggtgaaagtaaaacaacctcattaggttcaatgacatcttgaactttttttactgcatcttctatatcaactgctttgattacttctttaccttgactattacctaatttagcgaatttatcttgagtttcaccgaaaactaccattactctaacatgtttcatgtaaggaattaattcatcaaatccattacctcgatctaaaccaccacataaccagataataggttgtttaaatgaatttaaagcaaactgtgttgctaatgtattggttgctttagagtcattatagtatttatttgttcgattcgttccaatatattgtaatcgatgttcaatacctgagaatgttgttaaactatctacgatagccttaattggcacgcctgcaagtattgcagctaaaacagcagctaaaatattttctaagttatgttctcccggtaaaactaagtcatcaatattaataaggttaacattattataaacgatataattatctttaatatagatgccatctacttcttgttgagtagaaaaatataatgttttagcttttaaattttcagtttcaattaaatgacgttgatgataattacaaatcaaataatcatcttctgtttgatttttgtaaatacgtcgcttcgcattttgataattttctaatgactcatgataatctaaatgagcagaatagatatttgtaatgatggcaatgtgaggtctgtaatgttcaatgccaagtaattggaatgaagataattcagtgattagatattcatcaggtgacgtttcttgagctactttagaagcaacatacccaatatttcctgaaagtcttccagttaatctactttttttaaacatatctccaatgagagaagttgttgttgttttaccatttgtaccagttacggcgataattggagcttcagaaattaaataacttaattctacttcagttaaaattttaagacctcgttgatatgcttcatcaataattgaaactgtataaggtatacctgggtttttaacaataattgggttgctatcaagtaatgataatggatgaccaccatcaacaattttcacccctaatgtttctaagtcttttgcatggggatctttagataaatctttcccatcatttacagttacatttgcacctaatttaactaataacttagcagcttcataaccactttttgctaatccaactacaagaacatctttattctctaatcctgtataatttagcattctaatgcactcctatccataatccaattaatcctgaaattaaccccacaagccaaaatactgaaacaactttccattcactccatccgctaagttcaaaatggtgatgaattggtgtcattttaaagattctttttttagttaatttataagatgatacttgcaacattactgataatgtttcgataacaaatactaaacctataaaaagtaatgaaaattcttggtttaacatgattgaaattgtagcaaaaatacctcctaatgctaagcttcctgtatctcccataaatactttggctggatttaagttatacggtaagaaaccgagtaatgcaaaaatcataataatacaaaaagtaccaattgcaggggcatttaacatgaaactcataattgcatacatagtgaatccaataattgataagccagttgctaatccatccaatccatcagttaaattaactgcgtttgaaaacccaacttgccaaaaaacaataaaaataacgtacgcaaacgacaatggaattccaaaattagtaaatggaatatttatacttgttgaaaattctattaaatgaaaaacatcacttagaatgaaaaatataattgctattgcaatttgagctaaaaatttctgcttacttgtaagtccttggttattttttttaactacaataatgtaatcatcaataaagccaatgagtccaaatcctattgtgacaaagagtaatagaataatgggattagaatgatctgtgaaaaatatagcaatcatagatgtaataataatactaattaaaaacgttaaaccacccatggttggtgtacccgtttttttcatatggctttgaggaccttcttcgcggatactttgaccaaatttcattcgtttaagtgtcggtataagtacaggaactaaaataaatgtgataagtaatgcgataatcgcaaatataaaaagcatggtaatctcctttatgtattttaaatttattcgtttttcactttatttcctttataatcttatcaattttcaaactaattttatatatattatgtaagaaattgagattataaataaggtatccataatatatgacaccttatttataatcatttaaaatgacgtcatttgttcttatgaatcgtttttatcattagacgttgtatcagttgaattatctgaagtgttatttgaatcagatccactcgaatcagttaaagatgtattatcattaggatcatcagtagataattctatttcaattttcttattacttttgagtgttgacccactcgctacagattgatttgttacgtatccactgcctttagtcgtaacattgattccagttaattcttggaaggctaggacatcgtctgttgtccaacctttcatatttggcatagtaatatcgccatctgtcactgctaacactttactattcggtaataattttgtattagctctagtagattgagcttttattgtattaccattaccaataatgacaggttgtaaatcttttcctttaagactatcttgtgctttttgacttgattgccctacaacatttggcactttactatactgtgctgattgagtctcatcttttttagagcctacatttaaatacttaagtgtattttccatgataggtttaaaagctttacttacccctaattcatatgcttcttgatcatttttctgagcaagactcataccggcataaacaataactcttggatgtttttttggcgcatctcccataaagcttacaaagtagggatttgctcctttaacgtatccactaccattttcattaacgacctgagcagtacctgttttcccttcaatatcataaccatcaatacgataattggaagcatgacttttatcactatttactactttatctaattctgtttcaactttatccgcagtttctgaagtaataggttttccaactatattcttttcacctttatagaatgttttctttgaaattggattatctatactttgaacaaaccaaggttttaacatatttcctttattaaagaaagctgattgtgcttgtatcatttgtacaggcgtcactgtggtcgattgaccgaatgctgatgttttttgttgtaattcatttgaccaagcaatatttccttttaattctccgtcaaacataccatttgtagatttaccaaaaccaaagcgctcgtaccaagatttcattttatcagcaccaactaaatcttgaagatgcatcatcaatgtattagatgaatatgtgaaacctaatgacattggtatttctccccaaccggttttattccagtcagaaattcttgaacccataatatcacgatgaccagattcatatttttctttaggattaaatttaccttcttgaatggcggctgctaatccatatgatttaaatgttgacccaggctcatatgcattttgatataaatcattagcccatttttttccaaagtctttacccgtttcggggttgaatgttggacgttgactatatgcaagaatttctcctgttttagcatccataaccactgcaaataaatcttttggttcatatcgtttcaccatatcatcaagagcctcttcgacaaatacttgtatatttgaatcaatggttaaatgaacatcatcaccacgttttggcgctttttcatttttactgtttggtgcaatataaccccaaatgtcatgtatataagatagcgagcctttctgtccatttagataactattaaaaatcttttctacacctaatgcaccatttaattccccagtatcaggatttttttgagccataccaattaaatgagaagcaaaattaccgttaggatagaatcgttcagtttctggatataaggtgattcctggtaagtccattttatcgagtttaactttatcttgatatgttaaatttgtccctttctgtccaaattcaacttgaaaggctttcttttgattaagacgtttttcaatttcatcaggtttcatatcaataatttttgataattgttttgctgttttctttttatctttaacataccttggtgtatcaccaacttctccagcatttttatcaataatagcaactaatttatatcgttgaacatcttcggctaaaattttaccgtttctatcgtatattttccctctttcaggctgttcttgcgtttttacgagatatttttcattagcgcgcatcactaaattttgtccatctgaatgtccagttatcatgatatatgaatatcttaaaaccaatacaaaaaagagcagtccgaataatccaacaaggaggactgctcctaatttattttttctaattttaatttttcgcttcgccattagtacgcactacctttacattatcgttctttaggctcataccttgttttttagcctgatcgtaaatgcgctcataagaagaatttttcttaatttcagattgaattgcattattttcattagattgttgttcaatcttttgatctagctcggcaattttatcatttgtatcgtacgcatccatttttaaagatagcatatagattgctagaacagcaattgctgtgacaagcgttatgtataaaaatttctcaaatcgcgtaagttgaacaacaacctttttagttactgttttcgtctcagtttgtgtctttggttgttctttcggtatgctagtgtgctgaatgtgttcatatggttcgtaaattttttctacagccatcctcaattactccttattttaatatttcagcaacacgtaattttgcactacgtgctctattattttcgtctaaatcctcttctgtagcagtaattggtttacgatttactcgttttaacttaggtgtataagcttcaggaataattggtaaccctctaggcacatcaggtcctttttcgtattcttggaaaatttgcttgcacaatctatcttccagagaatggaaagtaatgactgaaatcctaccttttactttaacatgctcaatggcttgttcaattgaatcttcaaacgcagatagttcatcgttcactgctattcttatcgcttggaaaatgcgtttagcaggatgaccaccttttcttcgagctttagctggaataccttctttaataatgtctacaagctctaatgttgtttcaataggttgttgttcacgatgtgcttctattcttctcgctatttgtttagaaaatttttcttctccataacgataaaagattttaaccaatacctcataaggccaatcattaacaacatcatatgcagttaattcttgcgtttgatccatacgcatatctaactttgcatcatgatgataactaaatcctctttcaggtatatcaagctgtggacttgaaacacctaagtcgtagtaaataccatctactttttcaattcctaaatttttcaaaatatcagttaattctctaaagttattatgtacaaacgtgaccttgtgtaagtgatctcttagtacttctttagcattttctaaggcagtagtatcttgatcgattgcaatcaacctaccgtcatcgtttaattgatttaataaatagagtgcatgaccggctccaccaagcgtacaatctacatatatgccatcctctttgatgtctaattcatctattgtttcttttagcataacgcttacatgatgaaacactataaattcctccattaaaaatcaaaatctatcaaatcttcggcaatatcttcaaaactttcttctgattcttcgtaaaattcattccaagtttctctatcccaaatctctatacgatttgagacacctattaccgtacattcttttgttaaatttgcgtatttcctcaaattttgaggaatgttaatacgcccttgcttatctagctctacttcgatagctccagagaagaacatacgcataaacttacgtgcgtctttttttgtcataggtaaggttttcattttctcttctatctgttgccattcttcaagcgtgtagccaaacaaacatttatcaaggcctcgtgtgataataaaacgttcatttaagtcatatctaaacttagatggaattatcatacgtcctttagcatctaattgatgctcgtattctcccatgaacattattaccacctcaccttattaataatttaccacatctcaccactatcctccactaattatgtaaaatatcttaaaattctttaatttgacataaaaagacccatattatctattaaaataatatgggtcttttcctcataaattaaggttttataactatttggttaaatgtatatttaagtggaggataagtggagggactaaacacatctatcccaaattcattcatcatttgaagtggattccaaattctttcttgtaggccacccattggatgcaatacatgttcaatctctctaaaatgtttcatacttatatcgttatctctttcaatgttaagtaaatagcgatttaataaatattcaaattgtttattatgaatgtcataatttttctttactaaattgatattatcatgattatcattaacctctttacgaagtgattcgtatattttggcatgattctcttttaaagactctacttttttaataaatgtatctgaggctttgctacgaacgaatttttctctatccgtttctataccattcataataacatttttagcatttaacttatactgattaattagtttttctattctaattggtaaataagtgattttcattcttggtaaaacaataggcatttcaacatctaaaattttaaatacttcattcaattcagcccagtatttaatttcacttggtcctccaataaaagctaccgtattaaatagccattcttccattactggtctagttacaacattattagaaaaacgagttggttctttttcaactaattttaacaattcatctttattatatgtaatatctgatttactcaatttgaatacatcatcttttttagtaattagttgacgcatactatcttcatgaaggaacagatggacattggtatctgtttcaatcattttgtttaaacctgattgtgtagttaatttttgtgtttttctaaacgcttggttaatttcattatgtttttgaataatattttttaataatggcttctccaattcacgaattttttcatattgagcatcaataaatagtacaccgtaatctttaaatacttcttgaagtaaccctttaaaaatatcagtccaattattgtacttttctataatctctaaacatacttgataaagtgcgttagtatgtttcgtttcttttaattctttaaaaaattgattaagtgcttcaatcatctgttccttttctagaatatagcgagaaacgcctgtttcaggcggtgtcattgtatgatattttactttatgtaaatgagcatcttttgcattataagcatacgtatgatttacttcttcaaagtcatgatcttcacctgcaatccaaaaaacaggtacaacagtttgttgatatgtttcagttaattcacgacttaaattaacaattgaaagaattttatgaaacgtatataaaggtccaccaaaaagaccagcttgctggccaccaattaccactttagctccttcactgagtgcagtaagatgagtctgttgaatttctgttatattcaaatctgacatatatgatttaatcacttgagcaagttgttgctctctaccattattaggacgatccattctttgatcaaaactagatggtttgactggattatattgataaaatttcaataatgtttcatcactgttttctaatttagtaataaatgaatctttttcttgaaaattagttactttacagttcattcccttactccttcaatataacattacttattcagtataaagattatatccctagatgacaattttacggcttaactattgaaattcacatccattttatcagattataagtaattaatatgttattaaatgaaaatcgtatattaatgacgatacaatatatataaagaatttaaatgatgatgagaacatgactaaagttcaacatcttgaaataaaattaaaaactgttgaattatttgaggcatttagagaaattgataatgaagacttgcataaggagtcaatatatttgtatgatctctaaacaattaagctataaacgctatttgcataaataagcctgagccatttagctcaggtctcttattaattattctttaactaaattaaccaattcatataaagattgtatttcataatctggtacaatatcactgttattttctttattacgataattaaaccaacatgttgtaataccggcattttttccacctagtatatctgatgtaagagaatctcctactattattgaagtctttcttttttcttcaccaattctctcaaagatataatcaaaaaattcactcataggtttttgatatcctgtttcttctgatatatatactccagataagatgtctttaaactctaattgagcaatacgacgtttttgggtatctgtaacaccattagtcacaataaacaattcacattcttggcttaatcgatcaattgtttctaaagtagagttgaagaattttaatggtgctttagctagttcgtctctaaataaaacatcggcttttttaccatctacgtctataccatactctttaaaataattaataaaacgatgtgttaatacttcttctttagatagttcatttttttgaaatgcttcccaatgattttgatttactttcttaaaatattgaaaatcttcttcagttggataatgaccgaaatgatgtgccatttgatgaaatgctctatcttctgcatcaaaaaagtccacaattgtatcatcaaaatcaagtaaaatagtatcgtatttcatttttatactcctaaattatagtatgtatattattttagcagatttgtcatgattcattaaataatactaaaaaataaaaacacttaaggattaatccttaagtgttgaatacttgctattaagtattagaaaccaaatactttacctaatacacttgcaccacttgatacaatgtcaacaatacttgtacctaattttgtccagtcttgattttgtgctgctgttacagtatttgcaattgcttctgctaatttagtcatttgaatttccccattctgtttttatttttaaatattattacgttagaatcctaagtatttacctagaatgcttacgccacttgatacgatgtcaacaatgcttgtacctaattttgtccagtcttggttaattcctgcgtctactgtatttctgattgcgtcgaataatttatccatattaataactcctttatacgtaattaataattaattaaaatccgaatactttacttaagatacctacaccacttgatacgatgtcaacaatgcttgtacctaattttgtccaatcttggttttgtgctgcgtctactgtatttttaattgcttctactaatttagtcatttgaatttctccattctgtttttatttttaaatattattacattagaatcctaagtatttacctagaatgcttacgccacttgatacgatgtcaacaatgcttgtacctaattttgtccaatcttggttaattcctgcgtctactgtatttttgattgcgtcgaataatttatccatgtttgttatctcctttgtactatttataattatctttaaattagaaacctaaatatttactcactaaacctacaccgttttctacgatactaacaatacttgtacctaattttgtccaatcaccattaatacctgcagttactgtatctttaattgcgttaaataaaccttccattttatacactccttagaaattaattggtaaaattctaaaacgataggttactgtattgcttgctttgttttgtttaactatcgttttgttatctttactataaagggtttctttagatacttgtgacattttccgtaacttatacttaaatcatcaaaactgtataatttaaaaatttatatttacagttaggaattcaaatatgtctatttcgtcaaagttttttagattatcaaaattaaatatttaaaaatatttaatatataaatatatgatataatacaaaagtatatatttttattatatttattctaataatttaattaaatggtgataaggtggtgatgttaaaagtaattattacgtaaaatatgaatatgaggatgcatcaattgaattaggaaaaagcaaacaataaaagttaaaacgtatatttatatattcttttttaaatgttaaatataattaatttaacttatatattttatttaccattttaacatgattatttatttacttattcaacaaataaatatctaccttctgatattcaaaatctataattaataaacttttattcctaataatagtgtttaatgaatactaaaacacataacttaatagtaatgtcattttaataatttaactaattgaggagtactcataatggaagtaaatcaaaataaaaaagaaactaatggctgtttaagctgcctaggctgttttggtatcatctttttaattttattattgattggtggctgttctgctatattttcagatgataataacaacgataatacagataaaataagtgaagaaaaaaataagtctaaaaaaactgaagatacaaataaaagtaatacttcaaaagaaagtaagaaaaaatataatgagaatgaacaatctgtatcacaaaataatagtattaaaaaatctgaagaaaaagataaagataatgatgaatccgacataggtacaacgaataagataccagtaaaattaagttctactgttgatggtgatactgctaagtttatctataaaggtaaaaccgagacatatagatttttacttatagatacacctgaaactaaacatccaagagttggtaagcaaccatttggtcaagaagcatctgatagaacagctgaattattaaataatgctaaaaatatagaaatagagtttgacattggtcaaaaagaagataaatataatcgaaaattagcatatatatatgttgacggggaaatgctaaataatattttagtcaaagaaggtttagcaaaagtcgcttatgtttatccaccaaatacaagatatttagaaactctagaatcatctcaagaacaagcaaaagctgaaaaaatgggtatatggagcctagattcagcatttaaagaggataatgaggataataaagaaatgaatacatcaaacaacaatgaaaacaacgctatcgaaaatcaagtcgataactctttatcaaatgatagtcaatctaacgatactgaacaatcaactagcaacgttgaaactttccctaattgcactgcattaagaaaagttcaccctaatggcgttccttcaaatcaccctgcctatacatcaaaatttgatagagatggggataattacgcatgtgaagttaattaatctttctatattttttagtaagataattctcaacataaaataatcattataggaaattgtagtgtatataaatttggttattgaaactagttacgctaattatgttattcaattttagtcattccgagtatttgaatataaagatatatgaatattacatattaaaggtggtggtgctataaataagtggacgatgcaccttagaatacaaatgaatataaaagcctaatctacatataggagataagtcatggaagaaaaatttaataatgaacaagaagaaagacaatttagacagtttcaagaatatcaaaaacaacaagaagaagagaaaaagaaaaaacgtaaaaaaggttggctttggggttgcggtggttgtttagttttattaatcctattaatcattggtcttacatcatgtactggagcctttgtcaacgaagtagataaacaaatgaatgatggtaattcagaagttaaagaagacaaaaatgcttccaaagaacagacagcagcattaaattcagctaaaaattatgcggacggaatgcatatgtctaaacaaggaatttatgaacaattaacttctagtgctggagaccaattctcagaagaagatgcacaatatgcggttgaccacttgaaagctgattataagaaaaacgcattagaaagtgcaaaatcttatcaagaagatatgaatatgtctaaagatgcaatttacgatcaattaatttcaaattctggcgataaattcacagaagaagaagcgcaatatgcagtagacaacttagataagtagaatgatgagggtacttggtacccttttgttttactctatcacatttgagccattaagggtttataagttgcacagaattgattagtgttatggtaattgtttaattaaaatatttaatcagaaaggatttggttctatgtttgaaaatcttcttgcttctattggaataaactctgtgaaggttgaaactttagtaaaaaatagaagtattcatagtaatgatactttggaaggaattgtaagaatagagggtggtaattctgctcaaactattaacaaaatttcattaactttagtagaaagatatgaaaatcctgataaaaagagtcaatttcctgttttagaaaatgaattacaaacatttacactacacacaaatgttgaattaaaagaacaccacacaataacagaagaattcaaatttaatatttatgaatatgaatttaaaagtgaaccaaaacatttaatattaaaaacacatgcatatgtaggttattcagttgatgcttatgatgaagataaaattgttttcaaataagaaattcatgtttttataaaatcttattattaaaaataaaccaaaggggagatatataatgaaaaaattcttagctttaatttttggcagtgctttaattcttggcgcatgtggtaatgatgacacatctaacgaaaattctgatactaagtcggaaagtaaaactgaaaagaaatcagaagataaaaaagaaaataaatccaaagaggataaaaagtctaaagaagaaaagaaatctcaagaaaatgaagataactctactgaagaacaaaatacttcaaacgtagaagaaaagaataacgagaaacaaaataatcaaagtgataatgaacaaaatatacaagataactcatcaagtgaaaaatctcaaaacacacaaaatgttgatgtaacaaacattaaagatagaggtactcttgagtcagttatctacggaaattatagtgaaacagctaaaatccaagcttataacaatgcagtagctaatggtgtcattcctcaaggtaacgttatggaagggcctgctagtgcagcttatgaaagttctttaagagttgagagtggtcaagaaaaatcagtatatgatcgaccatatgaagaagactttgaacctgatgaagatactgatgatacagattacacgaatgatgttcaatcatcagattcatcatatccacgttcacttatgcaaattaaagaggaaacgggtaaatcacctagagatttcacagatgcagaaatggctgaagcacaagcatatgctgatgcacattaacttaatattttcagggtagttcgcctacccttattatttttttaaggagaagtgataaaaatggcttcatttacagtaacaaaacgaaaaaataagacttctacatcatggcaatatgatgtaaagcacccttcttttaagtcaggtaagaaacgtaaatcaggatttaaaacaaaagcagaagcgacgaatgctgcacaacaacttattagagatttagaagatggtaaacaagtagatagtaatagattgtttaaagattattataaagaatggctcaagttgaacggaaaatatgaattatcatcaaaacagcaatattggtatgaacactcgcttgatttatttttaaagcatttcggtgaagatattaaaattaaagatatcactcgaagtgagtatcaaaaatttatatctaattacgcacagggtagaacttcagaaacagttagaaaagttaatctttatttatctagtggtattaaagatgcagtgtatgatggttatatcaaaaaagatccaacatataacgttaaagcaaaaggaacaaaacaagctaaaaaagaagatgtaaaatttttaacgattagacagtatgaagagttaagggagcattttaagttaagaacagataaaagtacgattatgttgtatatacttttaattacaggtgctagattttcagaagtaaacagaatgacctatgatgacttgctaataactaaaggactcattcacttgccaggaactaaaacagaaaatgctgatagatttgtcgaagtttctaaaaatgatttaaaacatatatacaaggcattagagacgcatccacacagaattgataataaattatttggcttatctcatgcagcaatttctaaagtatttaataaagccaaaaagaaatataacatcaatgaagatgtcacaccttattcattaagacatacacacgcaagttacttgattagtaaaggtattccgattgaatacattagcaaaagattaggtcacgcaagtatagctatcacattagatgtctatacacatcttcttgatgaacataaaaaagagcaaggccaaaaggtcagagaaatattttcttgacacttatttgacacttgctcgctttaaacgttgatatatcaacgggttatagcgtcctgggagggattcgaacccccgaccgatggcttagaaggccattgctctatccagctgagctaccaggacattattttttaacacaagtattattatatctaaagaaatcttatttagcaatagctttaatataaaaaaagtttatattttccactaattacgtataattgcaactaatcacatacttttttcgttgctatttagttaaactaaatagctaaatgtttggtaccaaacttgaaattagataggactagactatcttgcattgtagtcctagcccttttaatagttaattaatttcaaattctattgattgaatgacttgatgatctctatttctaaaattcagcgtagcttttttactttcatcctctataagtagttctgcgtacgtttcttctatattactacgcgattgtgaaatactaccaggatttataatatggacgtctcctaatttttcatatttagctatatgtgtatgcccataaaacgcaaattgacaaccaagagattgtgctttttcagccaaacgcatacgcgtttgatttacaccataaagatgaccatgggtgtataatgctttaacactgttcttttcaataatgtcttcatttggaaattcaggataaaagtcacaattaccttttacacgttgatacaagctcaattcagtatcgttatatttaaattcagaatctcctaaatgtaagcatatatctgcgtctttatgatagtcgtataattcatacagaattccagattctgtatgattatcacttacaattaaccatttagacattttagacattatttttcacgctccaaatattcatttaaagctttaattgcatttccacgatgactcacatcgcttttttcttctgtagttaattcagccattgttttgtttttttctggaagataaaaaataggatcatacccgaatccataatcacctttacgttctgttgtaatttctccggatacagttcctttgaatatatgtgttggttcatttggcgcactcatactaatcacacatacaaattgtgcctttctatttgtcttaccttctaactttttaagtactttatcaatatttgactcatcatttttctcaagaccagcataacgtgcagaatatacaccaggctcaccatttagagcatatacttctaaaccactatcatcggcaatcactcttttattgagtgctttagctgccgcttcagattttaatcgtgcattttcttcaaaggtagtacctgtttcttcaacatcaaagtcttttataatttctgaaatgccaataacattatcatttggaaaaatagttttaaagtcatttattttacctttgttgttagaagctataacaatgtctgccacttaaatcttcctttcaattctgttttaaatttaatctacttttatacgttcaacttctacatctaattttaaccattgagaaatgatatgtttaatatgaaccgtatcacctgttgcaaaaaatcgatgttttggatgttgcgtatagcttgcatgttcattactaaacgtaagtaatgcacttacttcacgtgcagtttcaagcccagaagaaataacttttttatttccaccaaaataatcattaatgggtttatataataatggataatgcgtacagcctaaaataacagtatcggcatctgtgttacgccaatgttttaaagtctgatgtattacaatactagttattgtagggtcatcataacgcatttgttcaacgaggggtacgaaacctggacatgctaccccatatacttcgacatttgggtttattcttttaatatgatggcggtaagcttctgatttaatcgtgccctcagtacctaaaattaaaactttttgattttttgtagtcataatagcggttctagcaccaggttcaatgactccaataactggaattggtaataactgctgtaaatgttctaacgccactgcagttgcagtattacaagcaatgactaacatttttatatcaaattccatcagtttattagcaagttgcgtcgtaaaagtttttacttcttctccaggtcttggaccgtatggacaccttgcgatatcgcctaaataatatattgtctcattaggaagttgtcgcataatttctttagctacagttagtcctcccactccagagtctatgacaccaatgggtttattcatttacattcatccttataatacataatacatttattttaccatagacaaacctaatcattcattaattgatatttttgctcattttcattttactaaataaacatttatatccgtattgaattccccattaataaaaaccagcaaagtttttactttgctggcaaatatgtcatatttaatttacttgatgatcagaaccaaagaatgatttaaacatatggaacgatgtttcacggttcattgctgcaattgacgttgttaatgggataccttttggacatgcattaacacagttttgagagttaccacattcttgtaaaccaccttcactcattaaagcattcagtctttcatctttagtcattgaaccagttggatgtagatcaaataaacgtacttgtgaaatagcttgcgcaccaataaatttattattacgtgttacattaggacacacttctaaacatacaccacatgtcatacattttgataattcatatgctgtttgacgtttcttttctggaatacgtggacctgggcctaaatcataagtaccatcaattggaatccaagccttcatacgttttaagttatcaaacattcttgtacgatcaacctgtaaatcacgaatgactgggaatgtactcataggttccaaacgaatcggctgttctaattggtcaacaatggctgagcaggcttgacgtgcacgaccattaataaccattgaacaagcaccacatacttcttctaagcagttcatatcccatactactggcgttgttttttctcctttactattaacagggttgcgtcttatttccattaaacaagcaatcacgtttaaattctctttataaggaatttcaaatgtttcttcatacgcttttgcttcttgattatcttgacgtttaataatcaatttaactgttttttgcgtgtgtttttcttttttatgtgttatttcttgattatgttgttcatctgtatgacgtaattcttctggagtttcttttactgattgattgttagccatcattttttacctcctttagatttactagtatagtcacgtttacgtggtggaattaaactgatatcgacaggttcatatgtgaatttaggtgcttcatattcaccttgatattcagctaaagttgtttttaaccattcatcgtcattacgatctgggaattctggtttataatgtgctccccgagattcatttcggttatacgcaccaattgttatgacacgtgctagttgcaacatgttccataattgacgtgtaaagaatacagcttggttactccaagtttgtgtatcttccatatcaatattttgataacgttccattaactcaacaatttttttatccgtttctaataatttgtcattttcacgtactactgtaacgtttgctgtcataatttcgcctaattcacggtgaagtttataagcattttcagtaccacgcatattaagtaattcgtcgaaacgtttttgttcttcatctacacgattttggtaaatactgtcatctaactcagtatatgatgtttcgatattttcaacgtatttaattgcatttggacctgctactgtaccgccgtaaatcgctgataataacgagttagcacctaaacggttaccgccatgttgagagaaatcacattctcctgcagcaaataaccctttaatagttgtcatttgatcataatctacatataatccacccattgaataatgtactgctgggaatattttcataggtactttacgtggatcatcaccagtgaatttttcataaatctcaataataccacctaatttaacatctaattcatgtggatctttatgagataaatcaagatacaccatattttcaccattaatacctaatttttgattgatacatacatcaaagatttcacgtgttgcaatatcacgtggtactaagttaccataatcaggatacttttcttctaagaagtaccatggttttccatctttataagtccaaattcgaccaccttcaccacgtgctgattcactcattaaacgtaatttatcatcaccaggaattgccgtaggatgtatttgaataaattctccatttgcatatttagcgccttgttgatacacgatagatgcagctgatccagtattaatcattgaattcgttgttttaccaaaaataatacccggaccacctgaagccataataacagcatcagaaccgaaagatttaatttcagaagtagttaaattttgagcaacaataccccttgctgcattttcatcatctttaactaatcctaaaaattcccatccttcatacttagtaactaaaccatcaacttcaaaagaacgaacttgttcatctaaagcataaagtaattgttgtcctgtagttgcaccagcatatgctgttctatgatgaagtgtacctccgaaacgtctaaagtctaacaatccttcatttgttctattaaacataacgcccatacgatctaataaatggataatttttggtgcagcttcagtcattgctttgactggtggttggttcgctaaaaaatctccaccgtatactgtatcgtcaaaatgaatccatggtgaatctccttcacctttagtatttaccgcaccattaataccaccttgggcacatacagagtgcgaacgtttaacaggtacaattgagaataagtccacatgtgcaccttgttctgcagctttaattgttgacatcagccccgcgaggccacctccgacaacaataatttttttctctgccatagaattgtcactcccctaaaatatatctgaaactaacctattgattccttttataactatgcttttattactttcattttttatgcaaaagctaaaattgcagtcacacctatgtatgacagaattaagaaaataattaatgaaacccatgtgaaaatacgttgtgattttttagattgtaaaaatccccatgttactaagaatgaccaaataccattagaaaaatggaaaatgacagcaataacacaaataatgtacacgataacccaaattggattttgtaacgtttgattcatcatgtcataactgatttctttaccaaagaaaagtttttgtaaacgtgtttgccataggtgtacaaagatgaatacgaaagcaataatccctgttaacctttgtaacgcaaacatccagtttctaaataatgaataatggccgatattttctttagcagtaaaagcaatatgaataccatataatccatgatataaaattggaatgtaaattaaaataagttcagctgctaataaaaatggtaaagattccataaagcctgcagccttattaaaagcctcagctccttgagtcgcttggtggttaaccattaaatgaacaattaaaaacgcaccaatcggaataatccctagtagtgaatgaagacgtctaagataaaattcatttttagacttagccaaaaggagtcccccctgttataaaacttataaatttaattagcttctttttaagatagtactataaacgcatttactattttatttagtacttgtatgtataaacatataatagttataatgattgtaaattttctgaaaattaaacaaatcaaacatctctttttattagattgagtattattattttttataactacaagtatgtcttaaaaaagtaaatacaattaaaaataagacgaataaatgagatatacaagtattacacaataaccatgcaactactataaaatgataatatttctcatttagaaaacgcttccatactttcttaaaaaaataagctttttgttaactatattgtaacattctttctatatgtatggggtatgaaattcaaagtcatacccctttttttgaaattaatcttcttttaaagcatattgtagattttcagctacccttttaggtaatcctgcagcttttaaatcttctatactagcttctttcatttttttaatggaaccaaatgttcttaataattttgtttttcgtttacttcctataccctctactgtatcaagaacagattgtaatccagttttttgtcgggtttgacgatggaatgttatcgcaaaacgatgtacttcatcttggattctatggagcaaataaaaggcttgactatttttctttagaggtacaacctcagcatttgcaccgtacaataattcagatgtttggtgtttatcattttttcttaatccagcaacaggaatgtctaaacctagttcattttctagtacatctatgacaccagacatatgtcctttaccaccatcaacgataataagatctggtaatggaagaccttcattaagtacacgcgtataacgacggcgtacaacttctctcatcgacttataatcatcaggacctttcacagtcttaattttgtatttacgatatccttttttatccggtttaccatccacaaatgttaccattgccgaaacaggatcaacaccttggatatttgagttatcaaatgcttcaattcttatcggtgtttgaatacccattctttcaccaagttcttcgatagcttttatcgttctagattcgtctttagcgattaattgaaatttattttctagtgcaacttcagcattatgattagctaaatcaaccatttctttctttgttccacgcgcaggttgaacaatttttgtatcaactacagagtgaatgatatctttatctaaatttttcggtacatgtacttctttaggtaaaatatgttgatttaagctatagaattgtccaatgaatgtataaaattcttcttcttctgtttgttgtagaggaatcattgttgcatcacgttgaatcatatttccttgtctaataaagaatacttgaatacacatccaacctttagaaacgctatatccaaaaacatctctaattgtattatctgaagacataattttttgttttttagttaaattacgaatatgttgaattaaatctctatattctttagcacgttcaaaatctaacttctcactagcatctagcatgcgtgtttcaagattatgaagaattgttttatcttctccatttaaaaagtcagtaatttcacgcgtcatttgtgcatatttttgttgatctacatcatacacacatggtcccatacactgaccgatatgataatatagacacaatttatcaggcatattatcacattttctaaaaggataaatacgatctaataattttttagtttcctgtgctgaatatgcattaggataaggtccaaaatattttcctgtacccttttttactgtacgagtcacaagtaaacgtggatgtttttctttagtaatctttataaaaggataacttttatcatcttttaataaaatattgtagcgaggttgatattgtttaatcaaattcaactcaagtaataatgattctgtctcacttgaagttacaataaattcgaagttgcgaatttcactaacaagacgtgtagtttttgcatcatgtgcaccagtaaaataagaacgtagtcgatttcgtaatcgttttgctttacctacataaataatttggtcatttcgatctttcattaaataacagcctggttcaaatgggacgacacttaatttatctctaattttttcttcgtagtcggtcatccgtctcctcctttctattaacttgacgttcacataaaaaagacggagcgattacataacatgtaatgctccattcttttataattgtactaaatattatagatgtttatctaaaacttctgctaagttttctttaggttggaaacctactactttatctactgcttctccatctttaaatacgattaaagttgggatgctcattacttcatatttagcagcagtagatggattttcatctacatctaattttaagatgtctgctttaccatcatagtctccagctaattcttctaacacaggggcgatcattttacaaggtccacaccaagttgcccaaaaatctactaatttaacacctgattgaatgttttcatcaaaatttgaatctgtaacttttacgattgccataattgccaatcctccttaaatattaaatgatgagcaaattataacagactttccatatatctgcattgctcttgctcatctttatcactatttattaatcttgtcataaacttgtgttaagattaaacgcttgctttattgtacgtcaaattttaaaaaaatcaacattctagttttatattatttaagttctgctactgtaacaccaaatccgccttcacttggcattccaccacgaaaagattgaacacttttatgtttttttaaatgattttgaactgctttttgaagtgcacctgtacctttaccatgaataatataaacctgttcatagttacttaatacagcttggtcaatatattgatctaaagctccaaccgcttcttcataacgatagcctcttaagtctaattctgttttaatagtttgacgattttggcgtgtcaccattttagttggtttttcttttttctttttcgttttttctaaatcttcaataggtaatttcattttgataatacccatttgaactacagcttcattttctccgcttaattctaatacttcgcctttttgtccataagataatactttaacttcatcgccagcatgaatatcatcccatttttgtttttttacattttgttttaaggatttagcttcatattgatcttctaaatgttttttcttatcaattagttcatgttctttaacgtcggctccttttttatctcgcatttctcttaaatcttttagaatgtcatctgcttcttttgtagctgatttaattcgttgatttgctttatctttagcttcatccattaatttttgttcataatttttatattgttgatactgacgttccaaatcatcatgcgttgttcgtgcttctcttaataatttttcaagctcaatacgttgttcatccacacgcttagagtttttctctaatgattctatcattgaattaatttcttgttcgtctgtgccaatcattgttttagctttattaatgatgtttaatcctaaacctaattttttagaaatatcaaaggcattggaacgtccaggaacacccattaataatttgtaagtcgggcttaacgtattcacatcaaactcaacacttgcattcataacgccttcacgattataactataagctttaagctctggataatgcgtcgttgccataactagcgaaccaatatctcttacatgatcgagaatactcatagctaaggcagcaccttcactcggatcggttccagcacctaattcatcaaataaaacaagactatttttatctgtttcttttaaaatttctacaatatttttcatatgtgatgaaaacgtagatagcgattgttcaatcgattgttcatcacctatatcacagtatacattttcaaatacactcaattgactgccatctaatgtaggaatgagtaacccggattgagccatcacaatgataagtcccaacgtttttaaggtgacagttttaccacctgtgttaggtcccgtaataataaccgtttcaatatcatcaataaattcaattgtatttgctacgactgtatctttattcaataaaggatgataagcattaggtaaataaaccgttctttccttataaaaagtaggttttgtccctttaattgatcgtgcataacgcgctttagccgttaagaaatcaatttgacccataactgactctgccactaaacaattattatcatcagcagctactaaacctgttaattctgttaatatacgttcacgttctactgcttcatcatttcttaatcgactaatttgattattcatttcaacaatggaagagggctcaatataaagggtttgtccagaagctgattgatcatgcacaatccctttaaaatcttgtcgatattctgcttttactggtatcacattgcgatcatttcgcactgtaataatggcatctgaaagtttcttttgattagcttgacttttaacaatacgatctaaattttgtctaatacgttgagtcgtacttgatattttgcttcgaataccttgcaattcataacttgcattatcatataaatcataagcatcacatttttcatttatctcttgatataaatcagtaagtacaggtagttgattcattctttcatttaaaattggatactttacgacgccttcatcttcttcaagcagttgattataaaatgttttaaattgattttgtacttgtatcaaccgcttaattacatttaattcggtaacattaagcacaccaccaattttagcacggtgaattaatggtgatacttttgataaaccacttaaactaggtaaacgatgtttattataaatttgtgatatttcatctgtctcattcatttgaaattctacagtttcaaaatcagttgctggagacattttagacactttttcacgtcctaaatcacttatcgtttcagaagctacaaatgatttgattttatcaaactctaagacgtctaatgttttttgtctcatacaatccctctatttctgtaatttaatattattattaataaagtttttaaaagcgtcacgcgtcattgtattaatcactctatctttatttacaaatcctttttgcgcagtagctacgccatatttcataaaatcaagatgatccacatgatgggcatctgtattaattgttaatttaatatttggatattttttaacagtggcagcatttaaatctaatcgttttgggttagcattaatttccattaccgtttgtgtttcttcggcaagttgcatcaactgttccatattaggttgatacccttcacgtcgctcaataatacgaccagttggatgggcaatatgtctaacataagggttacgacatgcatgttctaggcgcttcataatttcttcttcagattgattgaaactttgatgaatagctgcaataacatagtcaagttgcgatagtatatcatcctcataatctaatgatccatcaggtaaaatatccatttctgtacctgagtaaatatctatttctgtgtattcttcattcaatttttttatttcttcattttgacgtaatagtcgttcaacttgtaatccatgagcaacttttaaactctttgaatgatccgtaatgaccatgtattcatagccttttttaatgtttgcttcaatcatctctcgtatagagaaagcgccgtcactatacgttgtatgcatatgaagatcacctttaatatcatctaatgtaatgattgagtttaaatcacaatcaaactcgctgccatcttcacgtattgccggagcaatccaatgtctaccgaagtgttggtaaatttcagcttcactttggaattggagtaacgttccatcttgttgttcgataccatactcacttactttttcattttgtgctttagcaagttgtctaatgcgaatgttatgatctttggaacctgtaaagtgctgtaaggtatgataaaaggcttctggttcaacaagtctaaaatctacaccaatcgtttcatcatcatattctaattcaagcgacactttcgtttctccaactgcgacttctttcactttatttggaatatttaaaagttgttgttgtacatgaagagggtgtcgtgtactaataatatagtctaaatctttacttacttctttataacgacggaaactacctgcttcagaataatgttcaacttcttctaattgttctagataagtcataatatctttatttaaatgtcgcatcaaatcaataggataatgatcttttttagctcctagtgcttttactgcttcaagtatgttttgttctgtttttttagcaaatccacttaattcactaacttttcccgcttcacaagcttcttgaagactttctttatctgtaatatttaactctttatataactttgcaatttttttactacctaaaccttgaattttcattaaagaaattaatccttcaggaactaaacgttgcaattcttttaaagttgatgaggtcccagtttctcgatattcgctaatgacctctcctaccccttttccaattccttttaattcagtaatatcttttatttcatctaaagagcgttcatctatttcaagactttgtgctgctttgcgataagcagacactttaaacgtattttctccattcaattccatatatatagcaattttttctagtagttgaattacatctttctttgtcattacattcactccataaaaagagaccaggaggtttatatccatcacctagtcctgaccttttatcttttttatttataaatttagtatataagatgataaaaacggcatcttaaatagaataatatggcttaaataaccgtattttaaactttcttgaatccattcattaggatataaagatactaaatataaaacaagttgcagtacaatcacacttgcaatactacctaatacgcttcccaatattcgacttgtaacatgaatattatgatatgacactatattatcaaaagttacaataataagatataaaagcaacttacttataaaagcaatacataaaaatgccacaatagtatcaaaacgttgttgtacatcatggtattgaaatgcgaagtgcgtgtcaaaagcaactgttttaggaaatggaacaaaaacaatcatttgttttgatatatattggtaaaaacgatgcgcaatgaatagtgagacaagtgtagacgacaaatgaagactattcagccaaaggcctcttctaaaaccaattatcatatacatcaaaataataagtatcattactaaatctatagtcatttagctatcctgatgttttaattcataaatcatttgttttaatatttcgttttcttcttccaatttcactttttcgtccatgatattcactgcagttaaaattgcttttcttgttgtatctaatcctgctgatttacgtcctaataatcttagctgttcatctactaaatgtgctacataacgtatgtgttcaggatcatcgtcaccgataatcgtaaaattttgatcattgatcgatacattaatacgatttttaaattctaccattgtattaactcctgacttttgataatattttaaatttctttgactaatgttttgttgagtgaataagtagattattattattatacatgagtgtctcttatttgtaattatagatttaaatactattgatttataccactaaacctacgttcttatcttcattatgttaaagtatatctattagaattttaaaagagaggtttaaacaagttatgggaaatgtagtacataaattaactaatcaagatattgagcaactgatgaaccaaattaactttagtacatccaatttacctaatgggatgaaagcaagaaccaaatatcatgacactgtcattagtatttacaattctggtaaagttatgtttcaaggaaaacgtgctgaacatatagcgcgtcaattttgtactactgattctggaactaattcaaaatcttcaaaggcagatggtttccataatataacatatgatgattataactgtattggtagtgatgaagcgggaagtggcgattattttggcccattaacggtttgtgctgcttatgtatctaaagagcatatagatattttaagaacgctaggcgtagatgattcgaaaaaattaacagacactaaaattatagaacttgcagaacaactgattacctttattcctcattcattacttacattaaacaatactaaatataatgaaagacaagcactaggttggtctcaagtaaaaatgaaagcagtccttcataatgaagcgataaaaaatgtaactaacaagatagatactaaagcattagactacattgtcattgaccaatttgcagaacgtaacgtctacaagcgttatgctctaagcgacttaccttttccaaatcaaacaaaatttgaaacaaagggagaatctaaatcccttgctattgcagcagcaagtatcatttctcgctatgcttttattaagcacatgaattcaatatcaaaaatgatgcattttgatattccgaaaggcgcgagtcataaagtagatttaattgctgctcaaattattgaaaaatataatattagtaagttagattctatttcaaaaaaacattttaaaaatcgtgataaagcatggacattggttaataaaaagtatcaataaagaacattttagaatgctataagatagcactacgacgatgtctgaattcatcaaattcagtatcgagaattgtttcaacactattatttacatatcgtgacacatcatttgtgggaacaagtgctgaagtttctatcgataaagtaagttgagtcatgctagaactttatacataaggtacctcgttaatttagtttagtgaagtttattaaattatacgaaaggaccttatttttaaaagtatttcaatgtaaaactgtatataaaaaggattttagcgaaactcttgtgggaatacgatacgttaaaaactacagactagatctgtcccctaataaagagagtcaactatacaaagtattgtaaataatgaaaccagtaaatgactttataataaactcatttactggctatttttttaggatatatgtcccaatctcttctttattttattatcgaattgtagcgcctttagcttttaatgcttctaaaattttatcatgcactttagaaacacgttcatctgtaagtgtattttcagtatctaaataatttaaacgaatggctactgattttttaccttcttccaagtgttcaccttcatacacatcaaatacaagtgtattttttagaatgtcttcaccattctcatgaataatatctaataattctgatgaaggcatgtcacggtttacttccatagcgatatctcttgacacaccagggaattttggaattggttcataattaatgtaacctacagctactcgcatcattgaatcataatctaattcaaatacatatgtgcgtttaagatcattttcagctgctaattgaggatgtaattctcctacaaatcctatctctttaccttctaatgaaacaatcgcagttctgcctggatgaaggcctttaatttcgccagctttataagtgaaatctaaatttaatttttcagcaattcgatcgactacacctttagcaataaagaaatcaatctcttcttttttaccttgccaagtattaactacatattctccagttagaataccacttaaatattctatttcatccggtaattcatctttgccgttaccaaagaacacacgtccaatttcatataatcttacatttttatttttacgtgctacgttataagctgttgcttcgattaaatgtggtaataagctttgacgtaatgtagaatgcgcttcactcattggcataagtagactaattgtaggacgttcttgtaatgcaaaatctttcgcatggtctttagacacaagtgaatatgtgatggcttgatttaatcctgcaccttcgagtgtttcttttactgtacgcgttttatattgacgatctgtcaattttccactagttacatcatcgaacactggtaaagttgaaggaatattatcataaccgtatattcttgctatttcttcaattaaatcctccttaattgaaatatctttacgacgtgaaggtacatatactgttaaagtatcggcattttgaatcgttttaaatcctaattgttcaaaaatagctttaatctcatcatttgataaattaaaaccaattgtttgatttactttttcggcagtaatatcaattggcgtaacaagtgaacctaaatccccttgtgccactctatcttttaatacttcgccagaggcataatgttcaagtaaataacaagctctatcgactgcttcattgacaaattctgttgcaatacctttttcaaagcgacttgaagactcactacgtaaattcaaacgacgtgatgtgtgacgaatagatacagggtcaaaaatcgcaccttctactacgacattcattgtttgatcagtcacttctgaaaaatctccacccataacaccagctaatgcaataggttctttaccatttgtaataacgatatctgtatcaataagagttctttcagtatcgtctaatgttgtcattgtttcattttcattcgcttgacgtacaacaatatctttagaacccatatgatcttgatcaaacatatgaagtggttgaccatattcgagtaatacatagttagaaatatcaactacattattaattggacggataccagctttaattaaacgtgcttgcatccaaataggtgatggtgcaattctcacatttttaacaactcttgcactgtaataagggactttttcaggattatcaactgtcactgataactcatctgttgcggaagtttcagtttcgttaagcgttgtgtttggtttagtcatttcagcttgatataacgctgcaacttcatatgcagttcccaccatacttaaagcgtctgcacggttaggtgttaaatcaaattccataatttgatcattaagatataatgcgtctagtgcatcagttcctggtgtcacttcattaggaaatacgaaaattccattttcataatcttttggtacaacattacttgagacaccaatttcttgtaaggaacaaatcataccttccgaacgttctccgcgtaatttggcacgttttattttaaaccctccaggtaaacgtccacctactttagctacaatcacatattgattttcatcaacattaggtgctccacaaacaatttgaacaagttcttcttcacctatatcaacttgacagatattcaatttatctgcatctggatgtttttctttagatgttacatatcctactactaaatttttaatatcttttgagtaatctataatatctgctacttcaatacctgtacgtgtaatacgctcagctaagtctttagcaggtacaccagcatctacgtaatcttttaaccattcatttgaaatcaacattatgcttcacctctatcttctacagctttaaattgattaaggaatctcacatcatttgtatagaaatgacgaatgtcttcgattccgtattttaacattgctatacgatctggccccataccaaatgcaaagccagaatattcatttgaatcaaaaccggccatttctagaacattaggatgtaccatacctgcacctaagatttcaatccatccagtatgtttacatacattacatccttgacctttacatttgaaacaagagacatctacttccactgatggctctgtgaatgggaaataacttggtcgtaatcgaatctcacgatcagccccaaataattttttagctactaactctaacgttcctttcaaatcactcattttaatatgtttatctactactaaaccttcaatttgtgtaaattgatgactatgtgtagcatcatctgaatctcgtcgatacactttcccaggacaaataatttttactggtccttgaccgtgacgtttttccattgtacgtgcttgcactggagacgtgtgcgtacgcatcaaaatctcatctgtaatataaaaactatcttgcatatctcgggctggatgtgatttaggaagatttaaagcttcaaaattataataatcttgttctacttcgtatccgtcaacaatttcatatcctaatcctaggaataaatcttcaatttcttcaactgttctagttaatggatgttttgagccaatattaatttgacgactaggtaatgtaacatcaattgtttcctcagcaagttgttggtttaacttttcattttttaataattcttgtttttcttcaagttcattttgaattgcttgtcttaattcatttactttttgtccataagctggcttttcttcatttggtaaatctttcatatttttcattaaaccacttacagagcctttttttcctagatactttactttgacatcttgtaaagcacgttcatcttgcgcttcgttaatgtctactaaagcttgttgtcttaattctgtcattgaatcattttgagtcatgacttacacctcatactttctatttatcataaaatttgctttattaaattaaaaaaagactttcatccctaaataactgggacgaaagccttccgtggtaccacccaaatttatgcttaagcatacacttgttagcattgttaacgaagatgcactccgacttaaatttctttaagtaaccaaaaaggtgaaaaaaactaatgtaaattgaagtaagtttcagtcacgcttactttccctgtgcaattaatcatttagtttacgtctttttatcggtttatatttatctttaataaacatatcattttaattttgtatacaattaagtatagtcgattttaaatcaaaaggtcaacctttcaaatgataaagcaaaatacttccagcaatcgccacgtttaaactttccgctttgccgtatataggtataataagattttgcgaggtatgtgctaataattctttattaacaccttctccttcattaccaagtaataaggcaaatgtgtcttgcgattcgatgtttttataagacacagcattttctaaggctgtaccatatactgggccatcaaattgttcaataaatttatttaattctgttgtgacaataggaatgtgaaatacacttccttgacttgctctcattactttgtcttggtatgcgtctgctgtacctttttccattacaaccatatctatacccgcagcatctgctgtacgaattaacgtgcctaagttaccaggatcttgtatacgatcaagtaataacacttgtttcgcttttgagatatcatgtttaggtttttcaataactgcaaaaaaaccttgtggtgtaatagtccctgataatgattcagccactttcatattaatttcgtaagcttcttttgcatactctaaaagtctagaatctgttctttctggctcaattacaaataattgtttaatcattatattacttttaaatgcttcatcaattaaatgtatcccttcgatgagagctaatcctgttttatcgcgttcttttttctttttaagtttatttgctaatttaattttattattttgtgttgaagtaatttgttccataatagtctctccaaattatttttgatagcaatggtataaattgagataatataaaaaaagagtgggatagaattcataatgaattcgtattccaccttttttaaatagatataaattatttagaaacgacttcttcaccattgtaagaaccacagtttttacatacgcggtgagataatttgtactcgccacagtttgggcattcagtcataccaggtactgaaattttaaaatgagtacgacgtttattttttctagttttagacgttcttctttttggtactgccatgatatatcctccttaatattaaaacacataatctcaagtattcggtcatttaattattatactataaattaaattaacctgctattactctttatcatataactgttgtaatttttgaagcctaggatcaacttggcgtgtttgggaatcgtcgttatctttagagttttcaagctcaagcgcttgttcttcatcaataacttcccaaccgttaccttctgtaagcatttgatcactattctcagaaaatgcacgcattggcttctcaataataaccaattctttagcaatatctcggatattaatcataccatctgtagcaagatgataatgttcatcttcatctacttcttcttcggtataactattataaccttctaaatcaaatacttcggaagttctgacatcaagtggcacatctacaggcactaatgtacgagcacaaggcatagtatacgtaccagtaacatgcatatctgctatcacttcatttgattttatggttaattcaccttcgatatttacttctgataaatcaatcagacctaaaggttctattaaatcgtcaaagttcgccttttcattgaattcaaaaggtttaccttgatattttctcaattgcgttattgaccatttcatatggcttcacctctaacaaacacaaaatttattttaactttactattataagttgtcaagattttttcttaacatcttattatctgttacaatactaataatgaatactgaaaggacgaattgcaaatgaaaagtgttggattgattacagagtataatccatttcataacggtcatgcttatcatacgcaacaagctaaaacacagtccgatgcagagatctctattgcaatcatgagtggtaacttcgttatgagaggtgaacctgctatttataacaaatttctacgtacacaaatggcactttccaatgtcgatttagttgttgagttacctcttatcgctagtctttcttcaagtgattattttgcacagatagctgttcaagttgctctttatctagatgttgatactattgcttttggaagtgaaacacctgatataactcgccttaaaaacgctgcaaatgaaataatcaatttagaacatagttcaacttttaatcaaaaagtaaaagaaggtagtaattatgcaaaaattataaatgatttaattagcgataatactttactaaaaatgcctaataatattttagcaatcacttacttaaaagctatacaacaatttgcacctcacatgaaagtacttgctatccaacgtgtgcatgcttatcatcatgatgcgacaattgaaacatcatcctttgcaagtggttctgcaattaggcagtcgttaatcactcaagcaactcagtggactacagttgttccctcttcaattcaatcactgtatacaacacctcatttaactaaagaggatacatttaacttgattaaatatcatatcttaagtcattcaattcatgaaatggctcatatatacactatatctgaaggactagaacatcgattaaaaaaatatattaatcaagcaacttcttttgaatcctttatgtctttactgaagacaaaacgctttacctatactcatttacaacgcatacttatgcaaattcttttaaatgtaaaaaaagaagattctattcaatccatttcagctgtaagaattttaggaatgaatcgtcgcggacaaggttatctcaaacaattaaaaaccaaatttccagagcgtcaattcatcactaatattaataaaacatctgctcatttttttaaaaatgaaattaaagctaccgatatttataacttattatcaggtcaaaagaaaaatgattttaatacacctgtaattagattaaataattgaattaaagcgtatggaacatttcatttctgttctatacgctcattttttaatcttcaaatttttcttttaatgctctttcaacatgactaggtacaaaatctgaaatatctgccttatattgagccacttctttcacaacacttgaactaataaatgaatagtttgtacttgtcatcatatacattgtttcaacattactatttaattttttattcattgaagttaagcgtaattcatattcaaaatcactcactgctcttaagccacgaataattgttttagcgcctattttatcacaaaaatcgacaagtaatccattaaaattatgtactttcacatttggcaaatgttttacagattcacgtattaattccatacgttcttcaatagaaaatgtacctgctttactactattttttaatatacatacatgaagttcatcaaatcgatcagaacttctttcgataatatctaaatgtccataagtaataggatcaaagctacctggaatgactgcttttgtcttagtcattgtgttctcctttttttaataacaaagtatctgttaaaccgtaatgatattgcttaattacttcaaaatcatatgtattgattttttcttgattactaaactcacaaatgataataccatgttcttttaataaattaaacttagaaatttggtctagagccttatctattagccctttattataaggagggtctaaaaaaataaaatcaaattgaatgtctcttttattgatagcctttaacgctctatctgcattatttttatatacttcagattgttcctctaaatttaattgtttcaagttagcttggatcactttaactgctttaaagttttggtctacaaatataactttattcatacctctagaaagtgcttcaattcctaaagcaccactaccagcaaataagtctaaacctaagccgtatacttcatgtaaactgttaaaaataccttctttaactttatccattgttggacgtgtattgcgtccttctaaactctctagtggtttacttttatgttttccagcaatgactctcattttgacttacacttccatttcattcatttatttactataatttgttttgaaaaaggagaattaaatatttatgaaacaatcatttattattttaggagaaggacttacagatttattcgaatttcttactcttattgaatataatcatgcaagaatagacaaggttgtctatttccatacaccacagtcagacaaacaattatcgtcagtcgcaattattatgaatcctacgaccggtaaacaatttcaagccatgtatatgatgttaaacgctttaaaatatccctacccaagtagtaataaaaaatttgagatgattaatgaacaagctcaatcgtatgatattcctattgtcggcattgatgttcaaccgccaaatgcatttcatacgaatgatttatattttaaatatttaattagcgtacttcgtttacaaaattggatcccaccgatgcaataacaatttttaaatacatcttaaagcatttcatgcttttctttatcatatgtttttttcaagtttttatagggggatccatcaatatgtaagacatattttaatttcattaatttctggagaatatcgtctacttcatgttcattaacatacattactacatactttcgaggtttattagtataaacaatatgtccatatttacgtatctgtctttcatgtttaatatgctttaagtaaataattaagctaactcttggaatcaattccatattatttcactcactccatttattatgcataattactataccatgactaataattttataaaatacattcattatctcaatacttaactttcaaaaaatattgatttaattattaattttaaatgaactttaggaggttataccttgaaacacattaagaagaatttttttaatttgggtatcactagtatgggtatactaagcagtttattacttttaaaaagaaatcaaaagcctaacatgcttaaagacataccttacttttttaatggaccagcaccttatatttttgcacatagaggtggaatgtcagttcgaccagaacaaacacaattagctttcgataatgctgttgattatggtttagatggctttgaaacagatgtgagactaactaaagatgaagaattgattgtttttcacgacgctacagtcgaccgtactactaatggttcaggaaaagtatgtgattacacactaaaagaattaaaaaaattagatgcaggatttcattttactgatatcaatggtcgacatatttacagagggcatcaacaagctagaattttaactttcgatgaacttttagaaatgtaccctagcaaatatatcaatgtagatttaaaagatgctccaagtagttatgaaggatctattgcgcctaaaaaaatgtatgatattataaagcatcatcatgctgagaaacgtgtacttgtaacgagttttcataaagaacaaaatgaacattttagagcaataagcaatggagaaatcgctactggcgcaagtcaacatgaagtgactgaaggtgtgattaagtttattttaggactaggctatcattatcatcctcaagctgacacatttcaaatgcctataaaattcaaaggtatcccattatcatcaactcattttattcaatggcttaacttattaaatattgtgccaggttattatggcatcaatagtgttgacttaatgtatgatttgtatcaaaaaggtgttcacaccattgttactgaccgtcctgatttaggtaaacaatttaaatcactactaaaacagcataccttaagttaaatacacttattctatatattatataaaattaaactatatgcataaaagaatctgagacatacatcatcattgtctcagattcttttaatatattaatcatcaataactaaaataaaaatatacttacatctaattttgcaactcaacctctgatttactagatttttattcttaattataaactacaattacatgtgcctcctgaggcgcaacctttagaatctgttttaaaaaatggattacccacttcaatctttacattttctgacacagataatgcgattttagtcaacacttcatctattaaattttgtaattgtacttctttagatttgtaatccattacattaggcaacatttcataagctcgcttacgtcgacgtgtatctaacatgacattttgataatctgggtgatatctaccaaagcgcatcacttcatcataacgttcttttgattttaaaaaagcttgatacaataaatgtgcttcatcatcttgtttaagttttttttgagcttctctataattaaaatacacttttgattgtacaatcatgtctgataaatcttcaatttcatctaaaattgataatgtttcctctgtatacattatcggtcacctcacaacctatttttgtacaaaaataagtgaataataatttctcattacttctccacccatttcattatactttttatttaacattcttgaacggtgtatatccgaattcatccaactatgaattaatgtaggcacatcattgaaatcataacccacattttgacttgtagctataaaatcaatattttcgttatcaagttggctcttaagtgcaccttctgtaaattcaacatcttctgtaccagttgcttcatataagtttgctgaagcaatgtgtgatatgtctgaatttactttcaatggtggaatatgttttaaatctctcatttgattagtaatttcatagagtgttatcaattgatttgggttttgttcatatggtaatgaatttttattatttctgtcattattaaatttatcatctgatatatcttcttcatctgttaattgatacggttttataaatgctaatagttctttatctagatatcgaatacccataattcgatttgattgttgatctacataaacttgagcataaacattaccatatttaattagagtttgagttttaatatcttcatctgataactcaaaattatattgttttccattcactttaaaagaggggtcaggattaatactagttttttcaaatatatgtgaagcattttcattgatttttaatgattcggtttgagctttttctccagtagcataaacagatttaatttcgtcatgttttgtagtgacaatataatattgttgctttctcttaaatatataatcagtatatccgcctttaacagggtatgtacgatttgcttgtccatatttatttgtaagataattaatatctttacctatccaagtacctatcccatttttgggagcaggattttcagtctgttttttcacggaatgtgattcttgatttgaatgacttattttattgttgttattaggattttcaaggacatcaaattttaatcttggtgagtaaaataaataaattagaaatgtaattaaaaatacgattcctaaaactttaattactaacttagtcattactcccccacctctttagaattacatatattgtacaaaataactattttaacaatcaagtcattcattttttctaaactccaaatttattaattaaactacattatacctatttacaaataaaataaacaattaatattaagacatagcttatactaaacaattttatcatatcaatatagaatccactgttgttatttcatgataaaaaaggaagtgaatcagaattcattttgaattcgtcgtcctccttaacaatttgatcatcgactacccaaatattaaaaatacctgagacaactcattatgtcccaggctattctttaaaattattcaatattgttataaacctagtgtggctttaatcaacgatgtagtttctccacctggataaattacatataataataagtatactgccacacctgtaatgccagtaaagaaccatataattgaagcgacaggtccgattcttctatgccatttaaatttatctttaaatgcagtaataatttgaactaatcctaatacgccaccaatcgtagcaagattaacatggaagattaagaatatcttataatatgttctaacagaatctggaccaccaaaatctgtattacctataaatatcgttcgagttgagtaaataataaaaaacgttaatgcgaaaaatgctgcccataacataacttttttgtgagtattaacatgacgatgagcaatttgccaccatcctatcgctactaaaatagcactaattacgatacagcttgtactaatagttggtagaattggtaaactcatatgttccatccttatttaacttagatattttaaatcatttttattaaagagatgacaacgactaatgcaaagaatactactagataatttagtgaatagataaacatttttgttgcccacttagtttgatcggtatttttcttaaatgttgttaaacctataaaaatccatccaaaatttaataaagttgctaatacaacaaacgtagtgcctaaactagataataggaaaggtaatggtaataataatactaaccaaataaacatacttattcttgtacgtttaaaaccttttactgaaggtaacataggaatatttgctaatgagtattcatcactacgtttaatagctagagcatagaaatgaataggttgccaacaaaagacaactaaaaataaagcaaaagctacaagactgatttgtccatcaatagctgtccatccaattaaaggtggtacagcgcctggaaaacttcctactactgtattccaagtcgtatgtcttttagaccagattgaataatatgatacatatcctactataccaaaaagtcctaaaacacctgatggcacatttaataagaatagacatgcttctcctactaacatcataccaaaacttaacatcaataaatgtttatcagaaattctatcgtttactgttggtctactttgtttacttggcataattttatcaatatcttgatcataataattatttaatgcacaagcaccacccataattaatgtcgaacctatcaacattaataggatttgaggtattgacgataggaaggaatgatttgtcattacaatagctaaccaagcgcctgcaaaagcaggaattaagttaccctgtaccaagcccattttaataatttgttgtagttctttaaaagacactctacttgacggctgtgataaagtgtgttctttactcatggttcccctccttaaaattttcatatagtattatgatataataattacttataaaaggctaggttatatttatttaaattgtgacactttaacgactttctgtttcactaattttttgtctttaattattgtagtataatagtggtaatatttataattatatcttttatattaaaatcagagcataaatggatatcatattacaaaatattttaaattaatggcggggtgtttaaacttgtttaacaaacgaaaccttaaatggttatcaatcgtagcaacaattattatggcaatggtacaacttgggggcgccttagtaactaagacgggctctgaagatggctgtggtgcttcatggcctttatgtcacggtgctttattacctcagaatttgccaattgctacaatcattgaattgagtcaccgagctgtatcaggtttatcattaattgttgtgttatggttggccatcacagcttggaaaaatataggatacattaaagaggttaaacctttagcaattattagtgttgcttttctattaattcaagccttgattggtgcagcagctgttatttggcaacaaaattcttatgtcttagctttacattttgggatttcattaattagtttttcttctgtattcgtattaatgcttattatttttgaagtggataaaaaatatgaggctgatgaattatttataaaaaaaccattgcgtaatcttacttggattatgacgggcgttgtttatgtcgctatttatactggtgctttggttcgccatgctaaagcaagtttagcatatggaagctggccattaccgtttaatgatttagtaccccatactgagcaagattgggtacaatttgcacatcgcggtatggcacttatcactttttgttggattatgatcacatttattcatgccatcaaaaattattctgagaaccgtacaattagatatggttatactgccgcatttattttaattattttacaagtgattacgggcgcattgtctgtaatgacacatgttaatttaattgttgcattgctacacgcactttgtattactatactttttggcttaatcgcttactttattttactcatgcttcgttcaattagaagtgaaaattcaaaaattaaataaagttttaaaagacacgttagagttattgtagaacatataatctctaacgtgttttttatgcaaaaaagcataagatagaatgtcatttaactttctatcttatgcttttaaactttttaatacctactcagatttttcaatttcgattaataaatctcccgttgcaatagcatcaccatttccaacagtaacttttttaatcactccattaaacggagcttgaattgttgtttccattttcattgcttcggtaattaatagtggttgatttactttaacctcatcacctactgaaactttaacttcagtcacacttcctggcatttgagctcctatatgatttggatttgttttatctgctttaggttttacattcgcatttgtttttatgttttcatctttaatcgtaatacgacgtgcttgaccattcatcacgtaataaattgttcggttaccattttcatctgcttcgctaattgtttcaagtttaataattaaacgttttccgttttcaatttcaatctctacagtctccccgttacgcataccaaagaagaatgtcggtgtatcaagtaatgataagttaccatattgttgtctagtttgaataaattgatcaaatacttttggataaagtacataacttataatatcttgctcagtcacttcaccataatttttatcttgtaattgttctcgtatctcatcaaaatctactggttttaaatattctcctggacgttcagttagcggttgttgaccttttaaaataatatcttgtaattgtttattaaagccatttactggttgaccaatctcacctttaaagtatgacactactgattcaggaaaatctaatttataaccttgttcaataatcgattgttcatctaaatcattttgtaccatatataacgccatatctcctaccacttttgaagatggtgtcactttaacgatatctccaaacaagaaattaacacgacgatacatatctttgacctcattaaaacgttcaccaagacctaaacttttagcttgttgacttaaattagagtattgaccacctggcatttcatgttgataaatttctgtattaggtgacttaatatcactttcaaagtcaacgtagtatggacgaacagtactccaatagtgacttaattcttctaaaccttgaatatctgtacgcatatttcgtttaaatccatctaatgcataatataaagagttcacacttggttgacttgttaagccactcatcgatgcaatagctgtatcgataatatctacaccagcatcgatggcttgtttgtagattaataaaccatttccacttgtatcatgtgtatgtagatgtattggtaaattaactgcagcttttaattctccaaccagttcatatgctgctctaggttttaataagccagccatatctttaattgctaaaatatggaaaccttcacgttctaattctttagctaatttaacatagtaatctaaagtgaacacatttgaacgttctgggtttaaaatatcacctgtgtaacaaatagtaccctccgaaattttacctgctttttgtaccgcttcatttgccactttcatttgatctacccagtttaatgagtcgaaaatacggaaaacatctacacctgctttagcactttcatctacaaatttttgaattacgttatcaggataattcttataacccacagcatttgaagctcttaataacatttggaataatacatttggaatcgcttttctaagtttttctaaacgctcccaaggattttcttttaagaagttgtatgctacatcaaaagtagcgccaccccacatttctaaagaaaaactatctttaaatacttcagcagttttagaagctatatttaacatatcttttgtacgtacacgcgtagcaagtaaagattggtgcgcatcacggaatgtcgtatcagtaattaaaacatcatcttgtgctttaacccaatccgcaactccactaggccctttttcatctagtaattgttttgtaccatatagactttgaattttcttttttgaaacttgcggaatcgaagttgactcatagtctggcttcgtacgtttttcgacattcggaaaaccattaatggttacattcccaatgtattctaatgttttagtaccacggtctaatgtaggtgcaatatcgaataattccggtgtttcttcaataaattttgttgtataatctccacttcggaatttttcattacgcatgacattaactaaaaatgggatatttgttttcacaccacgaatacgcatttctcgtaaagagcgttccattttttcttcagcttgtttaaaagtaatggcatgagtagataatttcactaatagtgagtcatagtaaggtgaaatttcagcgccttggaagccatctcctgcgtctaaacgtacaccaaaaccaccacttgaacgataagcaataatcgtaccagaatctggcataaaatcatttgtaggatcttcagtagtgatacgacattgaatagcataaccaagtgtttggatttcttcttgaggaggtaaagcgatacgttcgtcaaataggcttgctccatctgccactaaaatttgagttttaactatatcaattcctgtaatcatttctgtaatcgtatgctctacctgaacacgcggattgacttcaatgaaaaagaattcatccccagatactaaaaattccactgttccagcattaacatatttgatatttttcattaattgtaatgcagattgacaaatacgttctcttaattcatcaggtaaacctacagatggtgctacctcaactactttttgatgacgacgttgtacagaacaatcacgctcatatagatgaacaatattaccatattcatcgccaataacttgaacttcaatatgttttggattatcgatgtatctttcgatatatacttcactattaccaaatgatttttgtgcttcagatttcgcacgatgaaacgcatcttctaattcactttcttcgcgaacaatacgcatacctttcccaccaccaccacttgtggctttaatcatcagagggaaccctgcttctttagcaaatgcctttgctgcatcaaaattttcaattggtccatctgttcctggtataactggtaaatttgctttaattgcagttgttcttgcttttactttatcaccaaacatatctaaatggtctaggtacgggccaataaatgttatgccttcttcattacaacgtcttgcaaattcttcattttcacttaaaaagccataacctggatgtattgcatctacattcgcacgttttgctacttcaataatgcgttcaatatttaaataactttcggcaggtcctaaatcttttcccactaaatatgattcatcggctttatatctatgtaatgaatttttgtcttcatttgaataaattgctactgtttgaatatttaattccgttgctgctctaaaaattctaattgcaatttcaccacgattggctactaataatttttttatatgattcaaagaagaaacacccctttataatttgaatattctaactaattagataataaaattttatcttaaaataaatgagaaagctattacttttttacatacaatttataaaatgaaaatatagtaaataggttagcttaatcactattttaaaatgtaatcattaatatttattatacttaataactttatattatcatttataatttgaagacgctactctagactagtaatcctttaacttgtcacataaatgtaaaaagagtggaagcaaattttttaatactcgcttccactctcaataatgttagttacatatttacacctataattaagtgattttaatattgtctaggaatatccactttggattttttattttttatcgttcttttttcttcaactttaatttgtcttgctactaacaataataatcccatagcaatacttaaactgatcatagacgaaccaccaaaacttataaatggaagaggcacccctgtaagaggaatcgtggctgatataccccctaaatttacgaacgtttgactaccaatataactcgctacaccaacacatattaatttataaaaatatgaagatgttttagtggctaatacaaatgcacggaatacaataaaaaataataatccaattactaataaggcaccgaccagtcccaattcttcacaaattactgcgaaaataaaatctgtatgcgcttctggaagatagcccagtttcatgataccgttacctaatcctcgaccaaataatcctccatttccgattgccattaatgaattggataaatgatacccagttcctgaagaagaactaaaaggatcgtaaattgtactaaaacgtgcctttaaatattctggcatcattccggtgaaaataaagaacccagcaataagaataaatccaagaataatatataatataggtccttttactattttcttaacacctatacctacaaataaaaacattgataatataataattaatgttaataatgtttgtccaatatctccttgtaaaagtactaaacctaaacaaaggataattaaaataactggtcctttgataatttttaaattacctcttaactgtggtaattttttacttaatacataagaaatataaagaattaaagcaatttttagtaactctgaagcttgtagattcataaatcctaagtctatccaactttttgaaccattgatatttttacctaccaataatgttaaaattaaaaggacacagatgataatcataatccactgttgaatttttgattgtttaaaaacttttatattcatcataaatgaaataaaaaagacaataataaaactcatgataacataaattaattgtctgttataaaaatatgtacctgaaacctcaacgccacctgttaatgtccctttagtagctgccaccatactggcactgtaaaccatcactaaacctataaaacacaaaataacatatgaaattaataatggataatcgataaacttagaggttctacctatgtatcgaaatatattttttaaattattcataaaaaagatcatccaattctaaaaatttaaactatatatgctcattaaaacgatttatcaaattaaattctgtctaaactattatatactttgtaattattaattaacaaacataaatataaaaaataaaataaaaggactgaaaatattatttacataacatttcagtcactatcataaatttattacatatattaattcttgctcattataacactttcatattaaaagcattagacttagagttatacgtttgtgaatgcttcatgcaatttagataattctttttctaaacgaagcattaaacttttaccttcttctttatcaactaaaccaagtttcacagcaaagtctacttctttttgtaaaccaaacatttgtgtgtcgagaacctcttcatatagtgggcaagatggcatagttaaattatccatttgaaccttaattaaatgcaagattcggtcagcatcttgatttaattgctcataagcttcactatttatgttcatttgcttcggcatcacattctccccctatcattaaatatcttcatatcagaagtttatcctactaccttttaaaaagcaagtttattcaataaacccttcaatctaactatgataaaataatagttagattgaaactagggagtgggcaagatgattcaaattaaaggagatgtcaaatttcctattactttagatagtacaacatggatttttgatgatagaaaagtaaaaatagaggatattgaaaacggtatttttgaaggaactaaacctattaaatttgaagataaccgcgaatggaatagagcgatattagaaggacaaaccaatcctcctactttaaactctgaaattaagtatcgtaaacgtgctgtattagaagattcatttgcaataaatatgacaccattttttaaaaatgcagagcctttagaaagtgcaactacaattaaactttcaaatgatacatcttcaattgaaatcccattagaattattaccttatctttttttccaatttgctaaagatggtaagagattgtacgatgataattcagtagatagctttgtttataaccccgaggagaacgcctattcatataactttaaatatgtaactcgtattgaggtgatttaagttgcgagaagtacaatgtattatttgtgatactaaggtcttaattgatgaacgtacagttgaagctaaacgtctacgtaataatccaattaaaacattcatgtgtagtgactgtaaaagtcgattagacacacctagacaacgaccaaatgaaaatcgtaaatttaatctccattttccaaatgaaaacttatagtatacttttcaataataaaaagacgcaacatcaaatttgatgttgcgtctttttattagttttattgatcttgcatcatttgttttacacgtttcgcttctttttcacgtgcagctttatttaatattttttttcttaaacggatgctttgaggcgttacttcaaccaattcatcatcattaatatattctaatgcttcttctaacgttaaaattcttggacgattcattgtttgagtttgatcttttgttgctgaacgtacgttagtttgatgtttagctttagtaatattaactgttaagtcattttcacgattatgttctcctacaatcatgccttcataaacttcagtacctggttccatgaagtttacacctctgtcctctagaccaatgatggcataagctgttgcttgtccttgatccattgaaattaatgcaccattacgacgaccaccaatttgtgctttaacacgaggtctaaattcttcaaatgtatgattaataatgccataaccacgtgtcatagacataaattcagttgtgtatccaatcataccacgtgcaggtaccataaagattaaacgtgttaatccattatcagttgttaacatgtctaacatttcacctttacgcgcaccaagtgattcaatcactgctccagcattttcagatggaacttcacattgaacacgttcaaatggttcacttaatacaccatcaatttcgcgtaaaataacttgaggtttagaaacttgaagttcaaatccttcacgtctcatattctcaattaaaatagataagtgcaactctccacggccagctacaacccacgtatctggagaatctgttggtgtaacttttaaagatacatctgtttcaagctgttgatctaaacgttcttggatttgacgagcagttacaaaatcaccttcacgaccagcaaatggtgaattatttactttaaatgtcatttcaagtgtaggttcatcaatacgcaatactggtaacgcttcttgatgatcatgtggtgtaactgtttcacctacgttgatatcttccattcctgatacagcaattaaatctcccgcttgtgcttcttcaatttcttcacgttttaaaccaaagaaaccaaagatttttgttacacggaagtttttcactgtaccatctaatttaataagcgatacgttatctccaacacgcattttacctctaaatacacggccaataccaatacgaccaacgtaatcattatagtctaataatgctacttggaattgtagtggttcatcactgttatcaattggagcaggcacgtaatcaagaattgtttcatataaagactgcatgttttcatcttgtttttcagaatcaacactcgctgttccatttacagctgatgcataaacaactgggaaatcaagttgttcatcatttgcttcaagttcaataaataaatctaatacttcatctactactgcttctggtctagcagacggtttatcaattttattaactactacaacaggttttaaattttgttctaatgctttttttagtacgaaacgtgtttgtggcatagtaccttcataggcatctacaacaagtacaacaccatctaccattttcataatacgttcaacttcaccaccaaagtcagcatgtcctggtgtatctaagatgttaattcttgtacctttataatttatcgcagtatttttagcaagaattgtaataccacgttctctttctaagtcattagagtccattgctctttcatcaacatgctcattttctctgaagattccagattgtttaagtaattcgtcaactagtgttgttttaccatggtcgacgtgagcaataattgcaatattacgaacatcttctcttctattagtcattttataatatcctttcttaagtaaattcccacttttaattgcaacttttttattatatcataatattaacaaaagataactaaaaggtggggatggggatggaaaaaccaaaatctaaaggtatattctggatactttctattgtagcagttatatttttagtgctctttagttttagcgtgggtgccggaagtattccaatgatgattttaacatttatacttttcattgcaacgtttggcgccggatttacgcttaagaaaaagtatcgtgaaaacaattggctataatcaaccattaagatatataaagcttgagatatttttgtctcaagctttttttattgaaatcagattttttattttttaaagcgttgatgtaattctattaaagtagtcgtattaggcgctagataattttctaatatttctttatgaatatttgaatttcctactagtactgaattcgcacttgaaatatttaatggttcacctaataagttgctagctacgcctccaacttcatttaatacaataagaccaccagcaaagtcccaaggctgtaatctaggtgtgatataagcagccaattgtcctttagctacacttataatttctaaagctgcactaccatatgctctacaacttcttgcatcatttactatatcttgaaatatagggcccattttaggtttggttacccaatttggattgataccaattaagcttttctttagggtggtagattcaatcgtagataatgaatgtttattttcaaatgcaccctcacctaccttggcatgatataaaacatctttcattacatcatatacaaagccagcgtatggtttaccatttcggtagataccaattgagatagcaaaattttctttttgatgtacaaagtttaatgtgccatcaattggatccactacccatacgacaccttcaacatgagttaaatcatgaccatgtccttcttctccaataacacgatgttctggataactatgggttattgcatcatatatataattttcagtagctttatcaacattggtaactaagtcattcggatttgattttgtttcaatatttaattcttccttcatcattattctaactttatttcctgcttctaaaactaaacctttagcaaaatcatatagcgacatactatcatctcctgttgcttactattatacatcaaatcaattttataattgttatacatcattttataccttcatcactatatatgaaactcttatgaagagtttataagcataaaaataggtcgccaataaaggaaacctatcaaatccatgatataaaagactgaaaacatttaacatatacgaataaacatgtacattcatcttatgattatggaatacaaataagtaaaaggtcattatgctaattttaaatgtaaaatcggataatctctgctttggttgtctttttgagatccactctatgctttaaaaccatttttaatataaaatttcaatacatgttggttatctttattaacatctacatattggattttatcttcttgaatcagtgactgaagtataattgtaccgtaacttttattaaaatcttcaggatctataaacaacatttccaaatttttagtattgtattatagtcttttttcttttacttttattaatctcatgacactctcctaaccacgaggggtaaaatcctaaaaattaaatgactaacatctaggtactgactctacctttttagtttaaattaactatctatattgtatattactattctatcattatgactttgaaatatatgctacaataaactcaacatactattaaaataggaggaagatcaatgacacaatacacatttacacctaaagattttaaagcatttgacgttgagggtttagatgaacgaatggaagctttaaataaatatattagacctcaattacatcagttaggcgattattttagtgagtatttcacttctcaaactggagaaacattttatgcacatgttgctaaacatgcgcgtagaagtgttaatcctcctatagatacctgggtcgcttttgcacctaataaacgtggttataaaatgttaccccacttccaaattggcctttttagggatcaattatttatcatgtatggaataatgcatgaaggaaaaaataaagaagaacgtgttaaagtttttgacaaacattttaatgcattaaaacaacttccaaatgattatcaaattagtttaaatcacatgaaaaaagataaacaatatatcaaagatttaagtgatactgatttacatcaagctattgatcgtgttaaaaatgtgaaaaaaggagaattttttatagcacgtactttagctcctagtgatgaacaattaaaatcagatgaaacatttttagcttttattaaagaaacatttgatgaattcttaaaattatatgaataaatactattcttcggcctgggactttactagaaatctcaggtgttttttattttattggtaatcactcactgtcttgaagatccatctaaattcagtaatattcttttttacaacatttttaggttgacctaaaaatatatttaggttaatataattaaaaagattttaggaggttatgaatgaatcatatgagtaataaaaaacaacgcagcttagacgaaattaataatacagtagactttagtagtaataaaagtgcaagccaaaaatttttagcttttttaggtccaggattattagtagcggtgggatatatggatccaggtaactggattacatctatgcaaggtggagcacaatttggctatattcttctttttattattttagtttctagtttagctgcaatgcttttgcaaagcatgacagttagattaggtattgctacagagatggatttagcacaaatgacacgtcattatttaaatcgcccgttagcaattatattttggataatagcagaactagctattatcgctacagatattgctgaaattatcggaagtgcaatagctctagacttattgtttaatattcctttaattataggtgcacttataactgttttagatgtttttcttttactctttattatgaaatttggcttcagaaaaatcgaagcgattgtcggaacattaatttttactgttctaattattttcttattcgaagtatttatttcatcacctaaagtgattaatattcttaacggttttattcctcataaggatatcgttacaaatcatagtgtactgtatattgctttagggattattggtgctacaattatgcctcacaatctctatttacattcttcgattgtacaatcacgtaaatatgatagaactaatgagaacgataaggcacaagcaattaaatatgcaacaattgattctaatatacaattaagcatcgcttttatagtaaattgcttgttacttatattaggtgctgcactattttatggtgttaatgctgataaattaggaggattttatgatttatatcatgcccttaaaactcagccgcttctaggatcagtacttggcagtataatgagtacattattcgctattgcactacttgcatctggacaaaattctacaatcactggaacactctcaggtcaaattgttatggaaggatttttaagattatcaattccaaattggttaagacgattaataactagaggtttagctgtcattcctgttataatttgtttaattgtatttaaaggtaatgaaaataaaatggaacaacttttagtactttctcaagtatttttaagtatcgctttaccgttttcactcattcctttacaacttgcaacaagcaacaaaaaattaatgggccctttttataataaaaactggattaacttttgttcttggagtttaattattattctaagcctacttaatgtttatttaattatcgaaacatttaaagaattttttgcataaaataaaactattgttaaggtattgaacatgatatcttaacaatagtttttctctgtattcttttaattcattataacttccataatatcattgcaaaccacactatattaaactttcatatcaatgtcataatatgaatagtatagatttaatttttaataattaatgtaggttttacaaatactccaatagaactaattattgcgattatatcatttcaattatgtatgcattttattttaatttatatctttctattattacatacttatccaattttatttttattgacgataaataaactcccaagcaattcaattcaaattgcttgggagttacacgtaaaactaataaccttcaattattcctgttcaaccgagtgtttctctttgttttcttctttatttaaaatttgtttgcgttcttcataattcattcgacgttgattaacagcacttggctgattctttcttttttctttcatacgttgattataagctttacgtttttcttttttcttagcacgtaattccgctttttctcttttacgttgtgctttttgttctttcttatcaatatataagtctttttctacattattttcatcatcattaacttcattcggcatactattttttgatttatatttatactttctttgtcttgaaagcacgccagaagtatcatcctcatttgaagattgttgatattcacttgttacagcacgtttagggtattgattatatttatcttcctcaatatcctcattaaaatcttgctcatcattattttgagtaatatgatgataatcttcataatcatgttctctttcattataatcacttgaaggtttacgacgaatacgacgttctgattttttagtcttacgaggtggttctatgtactcttcttcatcattatattgagtaggttcttcttcataataatatctatcatcataatcatctctttgattataataagggggataatcgtaagtagaaccatatgctggaactgtttctattttacttcttcttgcaaacatcataatcgctgtaatgaagaagaagattggaataattaatgtaataaataataacactaaaggcaaagtaataatggaagcaattaaaaacaatattccagataaaattctaatattcatagaaatcaaagctaaaaatgaaattaataaacaaatgataaagtacacgataattgcccaaattccattttgtaaccatataacaaattgagtcgtatttagactattgttaactagtatttgttgtattaattgattattattcatggaattttcaagattttgaattgatgtatcattactaaatgatacgagtgcaataaacattgtaataaccgttaatattaataagaaaatccaactaatccaacctaaaagtttctcagttaaacggctcacaggtcgtttgatttgtgtgtatcgttctcctgacatttattacaactccttaattgacttgtcaaattattatatctaatttataggaaaataactactaattatcacttattttaacgacattttaaaattcaagaaactttcgttatattctcctaatgttttctcccctaaatctttataaacttctaatcgtttttgttctttttgagttggataaaaacggtgatcattttttatgttattaggtaataaatttctagccgccttattcggagtagcatacccaacccattctgtattttgtttattatttttagcatctaataaaaagttaataaattgatatgcgccttctttattttgcgcagttttaggaatgaccatgttatcaaaccatacattcgaaccttctttaggaaccacataatcataagtatctccctcttgaacaagtggtgctgctacaccactccatactacagcaatatggccttcattttgttgaagcatcatagtaatttcatcgcctactacccctctaacttgaggggtaagagattgtaagtcttgttctgcttgcttaatatgaacaggattggaatcatttaaactataacccaatttatttaaagctaatcctataatttctctagccccgtcaacaagtaatatgtcatttttgtatttagactgatataaattgttccaactatcaaattgttcattaggatacgcttttttattgtatagaatacctaccgttccaaaaaaatatggtattgaatagttattttgtggatcataagccatattcatataatcagaatccaaatttttaatattgggtattttctgataatctaaaggttctaataaatgtcctctttttaatttttgaacagtatattcacttggaaatgcaacatcataatgtgtaccaccatttttaatttttgcttccatggcttcattcgaatcaaacgtttcataaacaacttgtatacctgtctctttttcaaatttctttattaaatcgggatcaatgtattccccccagttatatacataaatttttttaccagtttttgtatgatcttgagaattaaaccaatgacttattcctaaacatatcaatcctactacaatggcaccgataattaactgaaaaaattgtttcattctattgcacctcttttagcacttctacgttttaatatattttgaagtgcatagtatccaataatacctagcacaatagctaaaaataagattgttgaaatagcatttatttccatactgataccttttcgagccatggcatacacctctactgataagacactaaatccattacctgtcacaaaaaaacttacagtaaaatcatctagggaataggtaagtgccataaaaaagccaccaataatagcaggcattaagtttggtaaaagtatacgtccgagtacttgagattctgtagcgcctaaatcacgagctgcatttaacatattatgattcatttcatatagctgtggtagcacaagaatgactactataggtatacagaatgcaatatgcgatgctaatactgttccaaatcctaatcctaatccaaatatatgacctaaagctgtgaacataattaaaaatgaggcacctatgacaacatcagatgaaatcattagtacattatttaatgtaagtaatgtcaatttaaacttcttatttcgcaaataataaattgatattgctccaaatgttcctataatagtagatactgctgcggatagcaatgcaactgctattgtattgaatattacagacattaaatgatcatcttgaaataaagcttgataatgttctaatgtaaaatgttcaaaatgtaccatatttccagctgaattaaacgaataaaacattaagaaaaaaataggaaggtataatataacaagtaatattcctatataaagtttcccgtaccatttcatttaattcaccctcttccatttgtttctttagatttagtaataattaagataaaggccataaatacaattaaaaagatagctattgtcgaacccattccgtagttttgaataactaaaaattgttcctcaatagatgtaccaatattaatcactttatttccagctatcaatctagtaatcataaataatgatagtgctggtataaatgtaacttgaacacctgtcatcacaccttctttagttaaaggaagtatgactttacgaaaagtagtaaatgtatttgcacctaaatcacttgaagcttgtaataaattattaggaattgatttcatgctattaaaaataggcaaaatcataaatggtatataaatataacttgcaacaagtaaaaacgcacctgatgtaaacaacaagtttagtggaccaatatgcattatacctaacattttattaatcataccttcgtgacttaaaattccaataaaagcatacgtttttaacaataaattaatccatgtgggtatgattaatataagtaaccaaatatttttgaattttgaagatctaataaaataggctgcaggataacttataattagtgtaatgattgttataagtgccgcataaaaaatagaatcccacatcatttttaaatatttcattgaaaagacttgtcgataatttgtaaaactaaagtgaccatttatatcgataaatgaaaaatatacaagtaatagcacaggaataataataaaaataatcatccataataaatatggaatgatgagaaatttatttaaattacgcatgttcaatatcctcataactttcaatacgtttatcaaattcttcttcagtttctccaggaaccataatatgaatagcttcaggttcaaaaaacaaacctacctgacttcctattgttgtctttttagtagattgaataacccattcatatcctttttcatcaatacaacaaatttcgtaatgtacacctctaaaaagcattgaatcgacagttgcagtgaataaaccttgtgtcgattcaactaaagaaatatcctctggacgaatcactacttcaatttttttcccagatggaatccgagcatcgacacattcaaaatcctgaccatatatattcactacaaaatctttaaccattgtgccatcaacaatattagattctccaataaaatcagccacgaatcgattcactggttcatcataaatatctgttggtgtaccaaattgttgtatttcaccatctttcatcacaaaaatataatcactaagtgccaatgcttcttcttgatcatgagtaacaaaaataaaagtgatgcctaatcttttttgtaactcacgaagttcatattgcatttcagtacgtaattttaaatctagtgccgaaagagattcatctaataataaaatttcaggtttatttacaatagctctggcaatagcgactctttgtttttgtcccccactcatttcatcaatatgacgttgttcataacctgttaacttaacaagttttaatgcttctttaacttctttatcaatctcttgtttagaaaacttttttagtcttaaaccaaaagcaatattctcatatacatttaaatgaggaaataaagcataatcttgaaatactgtatttactctacgtttatttgcaggtaatttttcgatagactgatttttataaataatttgaccttcattaggttgttcaaatcctgcaataagttttaaaatcgtagttttaccacatcctgagggaccgagcaacgtataaaaatatcccgattcaatatctaagttcatattatttaatattgttgtatcatcaaatttcttagtaacttttttaaaagataatagtgactccaatccatttcctcctttataagtatgatgctgttgctacaattagaattttaacttcattttctgaattattatgtaattgatgtaattcatttgctctaaaataaaatacatctccctcataagcttgatagcgctctttacctaacgtaagtgttacacatccctctaaacaataaataaaggtatcagattcagaaggttcaaaagatttgtacgatgatccaggcttaattgttattataagaggttccatttcattttcatttgaactgggtacaacccaatttaaaatatatcctctgtcatattcatcataaatagtccgttcactttttttatacaatactttttctttcgctttttccttaaaaaaatcacttggtgtagtacctaatacttctaatatacttaaaaatgtttccatacttggagacgcatattcactttcaatttgtgatatatatccttttgataaatcagttcgttccgctaactcttcttgagtaagatttttttgacgtcttaaattttttaatttatatccaatttgcataactaaccacctaaaaaaagctgtatcttgtttactattatcaaacattttgtttaatgcttaataaaaataacaaaatacagctttaaattcaataggtatattaaaaaattgagattaaattagagatcttaatgtttactaaaattttcttgatcaggatgttttttaacttcttggattactttatagctattatagccacttttttcttcaaattctttaaaaatttgtttttcttcagctttacctggcacaatttgtttaaattttttatattgtttcattagttcagtacctattatagatttttcataatagttttcaatttgattaaaaaatttaataacatcaaccatttcctcattagaccaatctaaatcgagtggatattgatattccataattaccctccaaaatataaacttaattctataaaaaaaggtggaactagattccttataaaatcatagtcccaccgtaaatggttatttcaattatttcaattaaatacgtcgatttaattctcaattatttcaaaaggaaattacatagtatggattggtaatccaatagctttttcagcaacttccatagtcatttcacctaatgttgggtgagcatgaacagttaatgcgatatcttcagcattcatgcctgcttcgatagctaaacctaattcagaaataatatcagaagcaccattacctgctacttgagcaccaataactgtgtcatcttcttttaatgtaattaatttaacgaaaccagttgtatcgtctaatgataaagcacgtccgttagcagcataagggaatttagatgctttgaaatctaaaccttcttctttagcctgagcttcagtatagccaacttgagctaattctggttcagtgaagcatacagcaggcataccaatgtaatcaacttctgatgcttgacctgagattacttctgcagctactttaccttcataacttgctttgtgtgcaagtggtaaaccaggtacgatatcaccaattgcgtagatgtttttaatagaagtacgactttgtttgtctacttctaataatccacgatcagcaaatttaagacctaattcttctaagcctaattcgtctgtatttggacgacgacctacagttactaatacataatcagcttcaattgttttttcttcacctttagcttcgtaagtaactttaacaccgttttcagtttcttcagcgtttttagccatagcttcagtgataatttcaacgcctttttctttcataccttttttaacaggttgaaccatttgtttttcgaaaccgccaagaatttctttagcaccttctaaaattgtaacttcagaaccgaagttagcaaaggcagtaccaagttctgaaccaatataaccgccaccgacaactactaatttaccaggaacttcttgtaagtttaaagcgcctgttgaatcgataacgcgtttaccaaattcaaaattaggaatttcaattggtcttgaaccagttgcaataatagcatttttgaagttatacgtttgagcacttttctcatccataacacgtaaactattttcatctacgaaataagcttcaccacgaacgatgtcaactttattaccttttaataaaccttcaacaccgccagttaatttattaacaactgattgtttaaattcttgaactttatcaaatttaagtgatacgctttcagcaataatccctaaattttcagagtgttgagcttctacgaaacgatgagaagcatgtaataacgcttttgatggaatacatccaacgtttaagcacacaccacctaagtcacctttttcaacaatagtaactttttgtcctaattgagctgcacgaattgcagcaacatatccaccaggacctgctccgattacaatagtatctgtttcaattgggaaatctccaactaccatgttttacccctccattaataataattctggattatttaataagcgtttgatatgattcatagcattttgaccagttgcaccatcaatttgtctgtggtcaaagcttaatgataatgctaatactggagctgctacaatttcaccatctttaacaataggtttttgagcaatacgtccaatacctaaaatagctacttctgggtgattgataactggagtgaaccattgtccaccagctgaaccgatgttactaattgtacatgtagcaccgctcatttcttgagatgttaatttaccatcacgagctttaacagctaattcattgatttcatctgagatttggaaaatagatttacgatctgcatttttaactacaggtactaataaacctctttcagtatctgcagcgataccgatattccagtaatgtttgtgtacaatttcaccagcttcttcattaaatgacgtattcagtgctgggtattttttaagtgcagaaacaagcgctttaacaacatatggtaagaatgttaatttaataccttgttcagctgcaacttctttgaattttttacggtgatcccataagtcttgaacatcaatttcatccattaatgttacgtgtggagcagtgtgttttgagttaaccattgctttagcaattgctttacgcatagcagggattttttctgtagtttcagggaagtctccttcaggtactgattgagtttgaactgcagaagtatcttctgatgttgaagcagctgcactttcatttgaagctgttgctgcttgagcaccgccaccatttaagtggttatcgatgtcttctttagtaatacgtccatttttacctgaaccagaaactgctttaatgttcacgcctttttcacgtgcatatttacgtacagatggcattgctttaattcgtctgttttcgtctactttttcatcttgtgatgttgaagctgctggagtttcttcagttttagcttcttcttttgcaggttcttcttctttagatgaagcatcgtcatcatcatgacctttaaattgcatttcttctgcatctggtgcgtcaattttaacaatgacatcacctacaactgctacagtgccttcttcaactactacttcttcaattgtaccgcttacaggagatgggatttctactacagatttatcattttgaacctctgctaatacgtcatcctcttcaattgtatctccggctgaaacaaaccacttaacgatttcaccttcgtggataccttcaccaatgtcgggtagtctaaattcaaatgccacgttcttatcctcctaagatttaaatatttattatttaaataaatttataacatagaggaaggacagaataatatgtcgtgtctgttaacactttatcattttgtcctacgtctctagtttacaattaattatatatacataaaataaatagaaaatacttattttaaatatatagattcatatatagcttactgttttgtatatactattagaattctaaagtagctttagcttgttcaataatatcatttttatttggtaaccaaacgttttcagcttgagtaaatggatatacagtatcagcagcagcaacacgtgcaattggagcttctaatgaaagaatagcacgttcagctaattcagctgctacagtagcaccaacaccagcttgacgttgagcttcttgaacaactactgcacgaccagttttttcaactgatgcaactaatgtatcaatatcgattggttgaactgtacgtaaatcgataacttctacagagtaaccttctttttcaagttcttctgcagctttttcagattcttgtaccattgcaccgtatgcaattaatgtaatgtcattaccttcttttttgacatttgctttaccaatttcaattgtatattcttcttcaggaacttcttcacggaatgaacgatataatttcatgtgctctaaatatacaactggatcgtttgatctgattgatgaaagtaataaacctttagcatcataaggaccagatggaataactactttaatacctggtgattgagctaaaataccttctaagttatctgcgtgtaattctggagtgtgtaccccaccaccaaatggtgtacgaattgttacaggagcagttttagaaccacctgaacggaaacgcgtacgagcgatttgaccagcaacttcatcaaacacttcaaatacgaatcctaagaattgaatttccattacaggacggaaaccttctacagttaaaccaagagctaaaccaccaataccagattcagctaatggtgtgtcgaatacacggtcttcaccgaattctttttgtaaaccttcagtaacacggaatacaccgccgttaacaccaacgtcttcaccgaaaattaaaacgttttcgtcattttgcaattcagttttaagcgcattgttaatcgcttgaaccattgtcatttgtgccatggcttatttcgactccttctctttgtaaatttcatattgttcagctaaattttgaggcatatcttcatacatgatatccattaaatcaagaacagtttgttttggagtattgtcagcctctttaattgctttcttgatgtcgtctttagcacgttcaataacttcgttttctttctcttcgctccataatcctttattttctaagaattttctgaaacgaactaacgggtcttttttctcccactctgcatcttcatctgaagttctgtaacgagttggatcatctccagccattgtatgtggaccataacgataagtcatagtttcgattaatgttggaccttcaccattaattgcgcgatcacgagcttctttagtagcttgatatacagctaatgcatccataccatcaacttggataccagggatacctactgcaattgctttttgagctaatgtagtagcagctgtttgtttactacgtggagtagaaatagcatagttattgttttggataacaaagattgctggtgctttataagcagaagcaaagttaataccttcgtagaaatcaccttgtgaagaaccaccatcaccagtgtaagtgatagcaactgcttttttaccacgttttttaataccgaatgccacaccagctgtttggatatattgtgcaccgataatgatttgtggactgaatgcgtttacgccttcagggaattggttacctttaaagtgacctcttgagaataagaaagcatcagttaacggtaaaccgtgccaaataagttgtggtacatcacggtaaccaggtaaaatgaagtcttctttttctaaagcatattgagaagctaattgagatgcttcttgtcctgctgttggagcatagaaacctaaacgaccttgtctatttaaagaaatagaacgttggtcaagaatacgtgtccacaccattctttccattaattctactaattgttcatcagttaaatcaggtactaagtcttcatttacgacattaccatctacgtccaaaatttgaaccatttcaaatttcgactgagtatcatttaatacttttactgcatcgaattgggcttgtaacttaggagccattcaattcaccatacctttcccatataatagaaattcattttatccactcatagtgtaccacaattattttagactgttaaacattttcataaagttctgtattactaaaaaaagatacagtctgagaaactgtatcaatgtaacaattaacactgtattagtgatgttaagagattaaatgatcgacgtcttgtttttctttattaactgtattcattgccttagcataagcctggaattttttcttaaagttttcttgagctttattaagcgcattgtttttttcgtctacttgagattgcgttactccatcttgtttgactaattcaaataaatctttttctttacttaatacatttctataagccttagcatagtcgtcatgtgttttatatttgttttttatagcatcatcaagttgtttaacttcttttcttttattatcatttttaatatcgttaatatgagaatcgccttttttaaattgcttttcggaattttttaaaattgaaacttccttatcaaaggttttttctcgtttatcaatattatcaagtacatcgtcagctgctttactacgtgtattactgtcattactatttgcttttttatacaaaccttgtttcttttcttcaagtgaatttagttttttactaacctcatttatagattgttctttatcaaatgctttttgaacattatcgtcataagcttttacctcttttttatcagttgtacaaccagctaataaaagtgtagaggcagctgcaacaactatggttttacgtaatttcattaatgtcattcctcctcatagtgtttcgattgtaatattatataaagatagtttataaatcaaatgaaactatataatgtacgtaaatgtatattatctgttatattttatattatataaggaaggtgtataacatgttaacaatgaaagatattattagagatggacatcctacgttacgcgaaaaagcaaaagacgtgaatttacctctttctgaagaagacaaaaatactttgcgtgatatgcgtgaatttttaattaatagtcaagatgatgaaattgctaaaaaatatggtctacgctctggagtaggtttagctgcaccacaaattaatatttcaaaaaaaatgatagctgtgtatttacctgacgatggggaaggtaaatcttacgactatatgttggtcaatcctaaagtaattagtcatagtgttcaacacgcttatttacctactggtgagggttgtttaagtgtagatgaaaatatacctggtttagttcatcgtcattatagaacaacaattaaagcttatgatattgatggtaatgaagttaaattacgtttaaaaggttatccagcaattgtatttcaacatgaaattgatcatttaaatggtattatgttctacgattatatcgataaagatcatcctcttactccattaccagactcagttgaagtttaatattcaagcctaatgcatttttacattattgtaataaatgtgttaggtttttctttttttattcaatttcctcctacttttactacatataaactgctttatttattctgatacataaggtaaaataaaaattaactgaaatcatagtaaattactatctttcaaaaaatgaacgacatgtatgatttgcctttaagcacagtaaaataaatattattttatattaaaaatttaaaatgcctgttatgtagcattcacgttagatgtgaaaataaataaacatgtatattttatttattttctacttgtgctcataagacaataaataaacatttatttaggaggaaatatatatcatggcagtatttaaagtattttttcaacataataaagacgaagtaattgttcgtgagaacacaaatacaatttatgttgaaggtgaaactgaagaacaagtaagacgttatttaaaagatcgcaattataatatcgaatttattactaaattagagggcgcacatttagaatatgaaaaagaacattctgatcactttaatgtggagaacgctcaataatgaaacaattacattctaatgaagtaggtgtatatgctctaggcggcttaggtgaggttggtaaaaacacttatgctgtggagtataaagatgaaattgttatcatcgatgctggaattaagttccctgatgataatttattaggtatagactacgttattcctgattatacctacttagaacaaaatcaagataaaattgttggtttatttattactcatggacatgaagaccatataggtggtgtgccctacctattaaagcaaattaatgtgcctatttatggtggccctttagctttaggtttaatacgcaataaattagaagaacacaatttactgcgtaatgctagtttaaatgaaataacagaagatagtgttataaaatctaaacattttgaaatttctttttacttaactacgcatagtatcccagaagcatatggtgttgttgttgacacacctgaaggtaaaattgtccatactggtgacttcaaatttgattttacacctgttggtgcgcctgctaatatcgccaaaatggcagagcttggtaaagaaggcgtattatgcttgttatctgactctacgaatgcgctagttcctgatttcacattaagtgaacgtgaagttggacaaaatgtcgataaaattttccgtaactgtaaaggtcgtattattttcgcaacctttgcatcaaacatctatcgtgtccaacaagcggtggaagcagcaattaaatataatcgtaaaattgtaacttttggccgttcaatggaaaataatattaagattggtatggagctgggttatatcaaagcacccccagaaacatttgttgagcctaacaaaattaataatattcctaaacacgagttacttattttatgcactggctctcaaggtgaaccaatggctgcactttcacgtatcgctaatggtacacacaaacaaattaaaattatacctgatgatactgtagtattcagttcttctcctattccagggaatactaaaagtatcaatcgtacaattaacgcattatataaagctggtgctgatgttattcacagtaagatttctaacattcatacatcaggacatggttcccaaggcgaccagcagttaatgcttcgtttaattcaacctaaatacttcttacctattcatggtgaatatcgtatgctaaaagctcatggtcaaacaggtattgattgtggtgttaaagaagaaaatgtctttatttttgatattggtgatgtgttagctttaacacacgattctgcgcgtaaagctggtcgaattccatctggtaatgtattagttgatggaagtggcatcggtgatattggtaatgttgtcattcgggatcgtaaattattatctgaagaaggattggttattgttgtagtaagtattgattttaatacaaataaacttctttcaggtccagatattatttcacgtggttttgtttacatgcgtgaatctggccaattaatttatgatgcacaacgaaaaattaaaacggatgttatttcaaaactaaattcaaatgatgatattcaatggcatcaaattaaatcttcaatcattgaaacgttacagccgtatttatatgaaaaaacagctcgtcgtccaatgattttaccagtaattatgaaagtaaatgaagaataaacacacacggtatttcttaagaaataccgtgtgttttactatcttactatttttttctcaaaacgatttaaatcattatcgtggccgatcattatcataatatctccaatttcaatattcatgtttggatctggtgacacaatgatttctcgtcctctttttattgcaataatattaataccgaattgtgctcgaatatctaaatctctgattgtttgaccagtcaatttttcacttacttttaactctactaatgaatgctcatctgcgagttcaaggtagtctagtacacttgcacttgctacattatgtgcaatacgacgacccatatctctttctggatgtaccacagtatcagcaccaattttattcaaaatctttgcatgataatcgttttgtgctttggccgtaacttttttaacacctaattctttcaatattaaagttgttagtgtactagattgaatattctcacctattgccacaatgacatggtcaaaatttcgtatacctaaacttttcattaccgcttcatctgtagtgtcagctacaacagcatgtgtcgcaatttcactatattcatttactcgagcttcatctctatcaatagccataacatccatatctaaagcatttagctctcttacaatacttcctccaaaacgacctaatcctatcactacatactctttctccatgacttctggaactcctatctaaaaaataagagctaaaatgataagttcatttatatactagaaacttattcaaagttctataaatataaattactctcattttagctcctctcttaatttaaattactttttaccttccacatattgtttatcgaaaacgaataatctcaataacaatattaacgatggaagtaataaaagtaaacctaaaataaagacgattgttaatgctaagcccattgatgagtttacacctgaatctgaaattttaatatatggataaagaatataaggtaacttactcataccgtatccgtaaaaagcgaaagccatttgtaaaattaccataataaatgctaaaccatgatactttttaatcatatttaaaattcctgcaattaagaagaaaataaaactaattgcaaacatccaccaataatgcgtaattgcattataaaagtgattagagttttgtattcttaatgataagaatacaaataatgaaataataatcatcggtggaccccagaacataaaccattgacgcataaatttataagctactttatcttttgctttagaagcataatatgttaaaaatcctgatgatatatataatacacttacaattgctaaaaatacaactgaccatgcgaaaggacttaatagtaactgtacccaatccaaatcaaaatgattgccttgttcattaatgtatccaccttctgagatagtcaatacagttgcgagtgctgcgggtattaaaagtccagtaataccatataaaaatatccagggcagtttattatcttgtccataatgttcaaaagcataaaaactacttctaatagaaataagaattaaagcgattgaaccaggaactaataacactgtccctaaataaagagctgaatctgggaaaaatcctacaaaacctacaaagaaaaatacaaaaaatacatttgttacttcccatacaggatttaaatatctttctataagatgattaatctttttttcttctcccgttaattttgtatgcaaagttaaaaatccagcaccaaaatcaatagacgctacgataatataaaaaaataggaaagtccataatactgtaatacctatgccagtataatccattattcttgacctccaatcactttatcaatatcctcgcgagctggtttatttctaaacattctcaataatacataggcagatgtaaagagaagtacaaaataaagtaaaccgaatagaattgttactaacgtaattcctcctgcctgtgtagcagcttggctaacacgcatgtaacctctaacaatccatggttgacgtcccatttcagttaagaaccaaccaaactctatagcaagcattgaagcaggtcctgttaaaagtactgcataaagcattacttttttagttataataggacgtagtttttttatcattaatgctaatatgaaaatgcctgatacgataaaacaaaagattcccatcgataccattaaatcaaagaaataatgaacgattaatggaggtaaatcatttttaggaaattcatttaaaccttttactttagtattaatattattatcagctaaaaagctcagtaatccaggaatttttatggctcctgaaacttcttgtgttttttcatttaagacaccaaaaaatactaaatctgctttagaatgtgtatcaaaatgccactcgtaggcggctaatttttctggttgtactttatgaagaaacttagcagacaaatctccagctaacattgataataatgtttgaataaatccaagaatcatagtcatttttaacgcttttttatgatatggcgcatcttcactatatttatttttcaataatttaaatgcagcgattgctgccaaaataaacgccatcgtcataccagctgttgcaacaacatgaaatgctctaactaaaaatgaagaattgaacattgcttcaaatggttgaacattaaccattttgccttttttcatttcaaaacctgctggagtattcataaatgagttcactgaagtaataaagaacgctgagaatgaaccaccaataataacaggtaaactaattaaaaaatgtatccattgatttttaaaacgattccatgtatatagataaatacttaaaaagattgcttcaaagaagaaagcaaatgtttccataaaaagaggaagcgcgataacatggccacccattttcataaacgtaggccaaacaagtgaaagttgtaatccaataattgttccagttacaactccaactgcaactgtaatcgtatacccttttgaccaacgttttgctaatgctatatatttaggatctttctttttgatccctaaaaactctgcgattgcaaacattaatggcattcctactccaatagtagcaaaaataatatgaacgcctaatgtcatccctgtcaaaaaacgactaatttcgacagaattcatacttaaccaccttttctataatttaaaattaaagcctatagatttaaattatatacctaaacattagtaactaaaatttttttgtttactttttaatagagaatttaaatggaattcacataaaattcacaatttgcattttttaattaccttatatatagtaagaaaagtataattaaaaggagaatatgatttatgtctaaaataattatctatacacaagatgattgtccaccttgtaattttttaaaaaattatttaacggaacatcatattaattttattgaaaaaaatattaagtatccttcttatcgtaaggaaatgttagaatatgatgcattctctacaccatttatcttattaaatgaggagcctatgtatcaggtagatttagaaaaaattaacaaaatatttgatatccaactgtagtatataaaaaaagaacctgagacatcataagttgtatcaggtatttttaatattatttagaaatgtgatgaacaagttctttaacttcatcttgtgttgcacaattaatggcacgatttgctaattccgtcatttcgtttttacttaaaccattaatttgtcttctagctttaagaatagaagttgcactcatagagaattcatctaatcctaaacctaataataatggaattgctgtttcatcgccagccatttcaccacacataccagtccatttaccttctttatgagaagcttcaataacctgtttaactaaacgtaaaattgctggattatatggttgatataaatatgaaacacgttcagacatacgatcagctgccatagtatattgaattaagtcattagttcctatactaaagaaatctacttctttagcaaagatatcagctaacgcagcagtagaaggaatctctaccatgatacctacttcgatatcatcagcaacttcttgtccttcgctagttaatttatctttttcttctaaaagaatagctttagcatctctaaactctttaatagtagctaccattgggaacataatatttaatttaccataagcagatgcgcgtaataacgcacgtaattgtgttctgaagatgtcttgttgatctaagcacaaacgaattgcacgataacctaagaatggattcatttctttaggtaaatttaaatatggtaattctttatctccaccaatatctaaagtacgtacaacaacacgtttatctttcatagtttctaaaacttttttatatgcttcaaattgttcgtcttcagttggcatttgatctctacccatatataaaaattctgttctataaagaccaattccttcagcgccattttccataacaccatataaatcatcaggtgtaccaatattagcagctaattctgcatgttcaccgtcaacagttacagtttcagcatcacgaagtttttgtaattcttttttatcttcaaagaaacgctcacgtttattttgataagcaatgagttcatcttcagttggatctatgataacgtcaccagtaataccgtcaacaataaccatatctccttgttttacttcatgagtaatcgatttagtacccaccacggctgcaatttctaatgaacggctcataattgcagaatgacttgtacgtccaccaatatttgtaacaaaaccttgaacaaactctttgtttaattgtgcagtatcagatggtgttaaatcatttcctataataactacactttcatcaatcatactaggatttggtaagtccacgcctaaaagatgagcaagtacacgcttagaaacgtcacgaatatctgctgcacgttctctcatatattcattatccatagattcaaaaatagtaatgaattgagtcgtaacttcatttagtgcttctggagcacttactttctcattcgcaattttatcttcaattggctgaattaactctggatcatcaagtacaagtaaatgtgcatcaaaaatagcagctttatctgcacctaatgatttttcagcattatttctaatttttgttaattcaattttggaagcttctaaagcatttctgaactttttaatttcagcatcagtatcagtaatgttctcattcgtaaatgataaatcaggttctactagtaaatatgctttggcaattgcaactccatcagaagctgcaatacctttaattaatttagacataattactctgttaaaccttcttttgataaaacttcattgatcgcttgaattgcatcttgttcatcgcttccatcagcatagatagtgatttcagcatctttacctacacctaaactcataacgcccataattgattttaaattgacttttttaccgttatattctaattgaatatctgaatcaaatttagatgctgtttgcactagcattgtagctggacgtgcatgaattccagtttcgtcaacaattacatatgatttttgttccataatctatttctcctccgtaagttagaaaattaaatttcttattatctaacataaaaatttataccctaacactaccaaaatatataactgaattcaattcttatataattgaattattatagaaaaatacacttatgttagcaaagtagcaatcattatataagtaatcaaacaaagtttgattacttataataggtatagctttatgtcagtcaattttctaatattatatataaatttcttcgcttttattatactacatttttaaaaaattaaataatatcacgtaaaactttttcacatttttctatatgatcttgacctaatttattcataaagtagtaactaattgaagctgaaacagcttgccccactactgggaaccattttgtttgttttgctgctgtacgcttagcaacatctctaataattaatttcaaagcaccactagttactttttcaccaatcattgaactaccttgaattgctgctgctgataaaatacgttctttaacatcttcaccaagagaattgacttgtttttgatcaagaccgtaaattttattaatatcttcaataatatctttcatcaatttgatatctacaccaaagtctaatcctggaattggcacaacactcatccctgaagataataaagattttttcttaacgactgctttagctttttctctgcgttgtgcaatttcttcttcgtttttaggtaagatatctttttcgttaatttcttctatatctaagacttttttaccaactttatcagtaactccatttgtaattttatgaataatccccatttactaactcacctttcgtttttcataatattttcaacatacatgtaataccctatttcagtactttaatgcttaatatttatgaatacagcttttaaatatttagaaggtttataatgtggatgtgttttaaagtcttttggtaatcccatgacttcttctatttcatattctacgttagcttgttccaatgttttcttaattacatttttaaatgcttttaaagaaaaagcacttgaatttgtacatagcaacaatgtaccatctggtgctaaaacatctaaagcaccattaattaaatcatcataatttttttgtactgaaaaagttttctttttattacgcgcaaaactaggcggatcaataactattgtgtcatattgttttccatgacgtgctgcataattataaaaatcaaatgtatccataacatagatatattgacttttaggatctacaccatttaacccaaaattttcttcggttaatgtacgagaacgattagctaaatctacacttgttgtaactttagcatttttagatgctactactgaaaacgcgcccgtataactaaatagatttaaaacacttctattttcggcaaaataatcacgtaattttttacgaacttctttttgatctaaaaatattcctgtcatcaatccatcgtttaaatcaacattgtaaaatgtaaaattttcttcaataactattggaaattctggagtttttccaagtacatgtccccctgtatactccgtatctttaaagcgcattttttcaaaaacagattcaaatttaaatactttttttattgcttcaataattatataacgaaacttgtaaattccttttgaataccattgaataagtaaatgtccattataattatcaatagttaagcctccaacgccatctccctcagcattaaatagtctaaaagcattagttccttctatattgtagtaatactctctttcttctagcgcttttttaaataaattttcaaagaaagtaatattgatatcttcttcttggctatatgtgattacccatcctaagcctttatgttgacgtcctacataagctgttgctatgtattggttattttcagtaactatattaaacaagtcaccttcttttaaatgatcatgttgaaaaatatcttcttcttcaactaaaggatattgatttaaatatttagtttctttgcctttatttaaagttgctattttcattttaatttctcctattttaatttttttaacgaatctgttgtgatttactctactattttaacaaatttaaaattcttcacctaaatattaaattaaaaaaagaagtggaacaatgaattcaaaaatgaattctattccactcccttactcagattatggtttttcttttaattgcaacgaaaatgctataattacaggtattaacataataattaatgtaggtgttataaatattgaaagtaatagaccatgaatcattatattaataaattcagtaagcaatttgaaaaatagaatactaatcataaacaactgtaaatagtaaaatttgcctcttaaaaaatgagtaaatgtcgtagcaatgtaaatgataataataaagagtaatattaacaatgtaatccattcaatcacgtattgagtttgtgataattcccattctccagatacaaatagagcatttctgttattaaattctataaatgtaaataagaataagataaacccacagaaaatttccacatatgctggtttaatccatttaggacgtctcatccacttaggaatatcatcttcttctatatctacaatatttttaaatttacttttaaatttatcgcgtttagatctaattttatctaaatctacacttcttcttgtcttatgtgcatattctgatgttttatcttgaagttgtttaaaatgaacttttgattgagtcgaaacgtttcctttttgagttcttgataattcaggctcttcttcccctaattcttcttttgttaaaggtaacgcacggcgtaagaataagaaattccaaattgccgcttgagctaataaccacataatgatgaagaatgtatttacacttaaaatatcaataggctcaatctcatttgcatcgattttgccatacaatgacatttgagtaatcaagtaacttattccatatgaaataataatccataaataatgaacttttctattttcttgatacaattcatctttataaacgatatatcctgtatgaatcacaaatggaataacgaatataattgcccaaaaaccatatacttgagtcatcaatgtaattgtaatgaggaagtataaaataccaatgactaaaaagaaaattgagatgtcgtaatcgtatttggttgttctaaataacgtatatccaatcaatatgactagaataccaaatagaataattatgactgcacttacaactggaaagttgcctatgaatctactcatcactctaattatttcactaaaaaatgcattaagaaagtcccatatattatgtatttttaagtcaattttatctttattttttagtttatgaattaaaggcaaattgatcaagataatgagacctgtgaagagtgaaacgataccgatcaagtaactatagataatctcggcgtgtttcttaagaaaagacatacagttcacctcaaaattaattatatatgaactttctattcttgtctttaataaaaaataaaatacttctctagactgagattaagtttatccttttattaattgggtatattaattttgtaaagtaatttatgaaaaaggagagttgtcctatgacacatgaagatgcaaaaaaagcaaaagaatatgaagaaaaattaaaagaacaaaaagaagaaaaaactgatgatattgaacaaactaaacaagacgttcaaaatacattagactaattttcttatttatgtcatcattaatagtaattaatgaataagcctgagacatacaagttgtctcaggtatttttaatatattggctatcgatgactgagttggaaataaattgtcctacttttattcaattatttttagaactaattacatttcacttattaaatatgtaaactgtttaattataatttatttttaattaaatatagattaaaagcatcttgacatctactattaaaagtcatacatttaaaataaataaaatataaatgcactaggggtgtatagcactgagatgaggcttaacctcaaaccctttgaacctgatctagttaaatactagcgtaggaaagtgttaacttaaataaatcatgtttttaataatcaatagcatttttatttaaatttacgcacaacttttctacgaagggttgtgcgtttttttaggaggaactattttatgtctaaaggtttaaagctttcagaaattctagttactgtgctgattgctgttatttttgcaatcatttataacttatggtggttgccatataatttagctcaagtagctggtatacatctagaacaacttacatacggtatttggtttatggctgctattgtagcttacttaattattcctaaaccaggtattgcattaattgctgaatttgctgctggtgcaggtgaaactattgttatggggaaatttgatattcctactatagtatatgcaattttacaaggtctagcatgtgaagttgtgtttgctatctttaaatacaaatcacgttctttaatggtagcaatgttagctggtttagtaacagcattagtatctttccctgtagattatttttatggctatctaaacgaagttgcgggttggaacttactacttttcatcattttccgtgctattagtggtattgtactgtctggtatactctcttatttaattgtaaaagccttagatcaaactggagtaactaaattattccgtcctgcctctcaaaaagattacgacaacttataaggggaaatgattgtgttaaaagtcaaaaatttacgtctaaaatatccaaatggtgatcgaaaaattttcgataatctaaatatagaaattaaagataaagaaaaagtgcttttactaggtccttcaggatctggtaaaagcacattacttaatgtactgagtggtattgttcctaatcttatagaattaccgatgaaatatgatgaactagacattgaccctaattcaggggttatttttcaagacccagatacacaattttgtatgccaaaagtttacgaagaattagctttcgtcttagaaaatcaacaagtgccaagagaagacatggatgaacaaattaaaaaagcacttgcgtcagtagatttagatgtagataattcaactttcgtaaataatttaagtggtggcatgaaacaaaaacttgctatcgtcgaaaccattttacagaaagctgatacactctttttagatgaacctacagctatgttagatgtacaagcaactgctgacttatggcaacgactcattcaattatggactgatcaaacggtattaattgtagaacataaagtggaacatatttggcatcatgtagatcgagtcatattaatgaactatgatggagaaattatagctgataatacacctgaatacatactcaaacattgtgaatcgttacttactgaatttggcgtatggcaccctcatgcatgggattatgcacctatacgaacagatttaacaccacagacttctaaaacactttttaaatttcaaaacggacaaataattcgcagtaaaaatacactatttgaagttccagaactaaatattcatcctggagaatggattacaattactggaaaaaatggagctggcaaaactactttacttgaatctatgatgcaattagtgaaatacaacggtacaatgttttatgagaaccgattactgaagaaaattaaagatgctgctcaaaatatgtatcttgtataccaaaatcctgaacttcagtttattactaattcagtttatgacgaaattaatattcattataatcatcttgataaagcaaaatcgaaagaagaaactgaacatcttttgaaacttttacatttagaaaaagttaaacatcatcatccttttgaaatatctacaggtcagaaacgccgattgagcgtagcaactgctttaagttcaaaagctgaaattgttttattagatgagccaacatttggacttgatagtcataatacatttcaattgattaagctgtttgaagaacgtgtaaaacaaggacaaactatcgtaatggtgacgcatgaccctgaaattattcatcgttatccaacacgtcgacttgtcgtagaaaatcataagcttttagaaatggcaggtgaatcaaatgtttgaacgttggaaaaagcgtcatacacttgtagatgatgtaaacattattacgaaattaattcttggagttttattatttatttttatcatttttgtgcataattttgattatatgatttatattactttattgatgtttatatttttattatcttttaatggtacagcttttaaagtcattgctgcatttttatcagcaaccattctctttgccttgctatcatcattattcatgattttatatggtgatggtacacatatgttatttgaatggggaattattcatattagtactgagagcattgtaagaggtcttcacttatttttaagaacaattacagtttcaatgtttggtgtgttgattgcattaacatcacaaattgtaatgattttctatagtttaatgcaacatttaaaagtaaaacctaaaatcgcttatgcatttatggctgctattcgtatggtaccacttattttcacatcatttatccaattaagacgttctttaaaaatgcgttaccaaatgattgatgcttccaattatcgtggatttaaacgtataaaacacttacttattccagtcttaagccaaaacatacgtcgtgcacatcaattatcagtagctatggaatcaaaaggatttaaagatggcccacgtacctattattataaagcacctttctcatacaaagatattctttttattggtatgacaattgctttacttattattgctttttatttatctcaatattttccaatcactggtattaaagatgctcgtgtttcagaaatgttagagtaatatataacataagacaaactaaagtaaagattgagttcaaagataaaagcagtttcaaaaacacagtaaattcatcttgctagtatattaagccctagcattataaaatacccatagatgaatgtcatctatgggctattatttttagtttatttgagcgctttatttccaatatctttacgataaaatagttgatcactcttaattttttctacatttccataagcatctttttgtgcttgttgaatagtttttccttttccaatggctaatacaactcgtccgccagatgtaagaaatgtatcattttcttttttcaaaccactaacgaaataatggttatttacttcaaagcctgaaacctctgcacctttctcatatgacccaggatagcctttcgaagcaagcattacccctaccacataatcgtcaatccattgaaaacgaataggttctttacggtctagagctacgatttgtgccatcaagtcactttctagacgacttaacaatacttgcgcttctggatcaccaaatcgtgcattaaattcaataactttaggaccttctttagttaaaattgcacctatataaagtaaaccaaaatagtcataaccctcttcttttaacgctctagcaattggttgagcaatatctttgtttgtacgctctaaaacgtcatttgaaatatggggaacaggacaataagcgcccatcccaccagtattaggaccttcatcattatcataggcacgtttatgatcttgagcaatacagtcaaaaggaactgcataatccccattaatgaatgtcattaatgaaaattcttctccttcaagaaattgttcaaagacaacttttccatcttcttgtggatatagcacttctaccgcttcaattgcttcatctcgtgtattagcaataattacgcctttaccagcagctagcccatcctttttgactacaataggtaattcgcattcatttacataattaagtgcctcagttttattgtctatttctttataatcagcagttggaatatcatatttttccattaaccttttagcaaaagatttagaaccttcaatttgggctgcttctttgttaggaccaaaaactttaacatgattgtctctcaatttattagataaaccatctatcaatggttgttctggaccaataatcacccattctatgtgatgttgttggacaaattgtaaaatagcctcatgatcagtttcagcaatttcagtgtgtacttcggctaaatgagtcattgcatcatttccaggaatagcataaagtttttcaataagtggcgactgatgtaattttgatactaatgcatgttcacgaccgcctgcacctataactaaaacattcatttcttttctccctctattctctcaattattttaaattagtgtttaaaatgacgcataccagtagtaaccatagcaataccatgtttgttagccatatcaatcgaatcttggtctttaattgaaccgcctggttgaataatagctttaataccatgttttgcagcaagttcaacagtatcatccattgggaagaatccatcagaaatcattactacattgtcatttatttcaattgcgcgctctaaagcaatcttagctgcacctactctattcatttgtcctgcaccaattccaactgtctgtttattattacttaaaatgatcgcattacttttcactgatggaataactttccatcctagaagcattgcctcccactgagcatcggtaggttcaacgtctgtaacaactttcatttcctctttagacacttcataattatctttatcttgaaccaaatatccacctgagactgaaacaaattcttcttcacgattatcaattgtcatatcaatttctaataagcgaatatttttcttttgagttaaaatatctaaagcttctttatcaaattttggtgcaatgacaacttctaagaaaatagagtgtaacgtttcggctaaatctttggtaacagttctatttagtgcaataatccccccaaagatagactgattatctgcatcatacgcatttttaaatgcgatttcaatatcagtgccaatacctacaccacatggattcatatgtttaactgcaacggcagctggttctttaaattttttcactaatgctaatgctgaatctgcatctttaatattattaaaactcaatgccttaccatgcagttgtttagcaccagcaatagtatgtttactattagaagtacgaacaaaacgtgctgattgttgaggattctcaccatatcttaattcttcactatctcctttgaagaaacttacaattgcatgatcatattcatttgtatgttcaaatactttaatcattaatgacttacggtatgattcatcgagtcgatgttccttaattcgttgaatgacttcattataatcagatggatggacaatagttgttacatgtttaaaatttttggctgcagcacgtaacatggttggaccaccaatatcgatattttcaattgcatcatcttcagttacatctggattagctacagtttgttggaaaggatataagttgaccacaaccatatcaattaaatcaatgtgttgttctgataattgttctaaatgttcaggtttattacgatctgctaaaataccaccgtgtactgctggatgtaacgtttttacgcgaccatccataatttcagggaattgcgtcaactctgatacagatttaacagttacatttgcttcttctaaagcacgttttgtaccgcctgttgaatacaattcataatctaattgcgttaatgatttagcaaattccacaattccacttttatttgaaacactaataattgcttttttcatgattaactatgctccttatttaataactttagctattacacttggataaagttcatattctaattgtttcacacgttcttctaacgtttcttttgtatcgtccgggtttatatcacattttcgttgttcaattatttctcccgtatccattccactatctacatagtgaactgttgaacctgtttccttatcgccactattaaatgcttgaccaattgcatctttccccttgtactttggtaataatgaaggatgaatattcaatattttaccttcataagcatttaataagtctggtcccactaatctcatataacctgctaagataatccactccacttcttcactatgaagaagttgaattaatttttgttcatattctcctttgttttcaaagtctttaggttcattaatatgaaccatcactttcaactgttttgcacgctcaatgcaataagcatcgtgatgatctgtatacaaagaagtaatttctatattattaagctgccccttatcaactttagatacaatattttcgaagttacttcctgatccagaggcaaatatagccaccttagtcatatctataccccctcaagataaatcggtgcatcattacttttaacaatttcccctatttgatatgcagcaatatcttgttcttttaagacatcaagtgttttatatacatcttctttatttacaatgacagtatagcctatgcccatattaaaaacgttatacatttcactcgtttcaatgtcagcttgttgttgtaaccattcaaatacttttggtgttgggaaggattgtgtatcaattttagctgctaagcctttaggtaagcctctaggtatattttcataaaatccaccaccagtaatatgattcatgcctttgattttaactttttcttttaaagttaaaataggtttcacatacaattgagtcggagctaaaaatatatcaagataagtacttccatcaaatgaatcattcaaattaattccagattcttcaattaactttctcactaaactatatccattagaatgaataccattagaagctaaaccaatgataatttgtccttcttctacttcagatccatcaatatattcatctttttcgactgctcctacagcaaaacctgctaagtcatattctccttcgtgatacatttcacccatttcggctgtttccccaccaataagagcagtatgagtagcttcacaaccatcactcacaccttttacaatttgctctatcacttccggaacaactttatttgttgctatataatctaaaaaatatagtggttctgcgcccgttgtaagaatatcatttacacacatggcaactgcatcaataccaatcgtgtcatgcttattatgatcaatggcaagctttaattttgttcctacgccatctgtaccagagactaatactggtgttttcatattaagctgggataaatcaaaagtcgcaccaaatccacctaatccaccaagtacttctttacgcattgtacgttgaacatgactagacattctttctaccgcttcataacctgcatgaatatcaacacctgattgttcataagctttagacatgtatatttccctctctatcaaaataatgtttatgattatcaatatattctttttgacgtgtacttaaattatttaaatagttttcttcatagtcaaatagacctgctggataatctcctgtaaaactttctacacataacccactatagggtgcatcaaaatctaatccaattgattctataagaccctcaacacttaaatatgcaagagaatctgcgccaatatactcacaaatttcttctggagatttattagcagaaatcaattcagcagtcgtagacacatcaattccataaaagctagggaacataaattctggagaagctatacgtacatgtattttatttgctccagcatctttaagcattctgacaatacgtttacttgttgttcctcttacaatagaatcatcaactaaaataatgtctttaccttctacaatatctttcactgccgatagcttaacgcgcaccccttgttcacgtaattcttgtgtaggttgaataaaagttcgtgcgacatattggttttttacaagccccatttcataaggtaattgaatctcttcagcatagccactagctgcagataatgatgaatttggaacaccgataaccatatctgcttgagccggactttcttgagctaattttttaccagaaactttacgaactgcatgcacattttttccagcaatggttgaatctggacgcgcaaagtaaatatattccattgctgaaatcgctgtgttagtatgacttgtatatgattttacttcaataccattatgattaatgataacatactctccagcatgaatatcttgaacatattctgctcctagcacatctatggcacatgtttcactagccaaaatgtatgttccatcttgcatcttaccaactactagaggacgaatcgcatttggatcaacagcaccatacaaagcgtctttagtcaatattgcaaaagtaaatccgcctttaatttgtcgtaagctttcttttagcgcctcttcaaatgtaggagctttactacgacgaattaaatgcataatcacttcagtatcagaagatgagtgaaaaatggcgccatgtttttcaaggtattgtcttaaagtttgtgcattaattaaattaccattatgacaaattgcgacactcatatcgtagaaatgatataaaaatggttgaatgttttcgatacctttatttcctgatgtcgcataacgaacatgtccaatagcatggttgccatcttttagtttattaagttgtggttctttaatggcttcagtaagtaagcctaaaccacgttcaccctttagagtatcttcatcagaaactacaatccctgcaccttcttgccctctatgttgtaaactatgcaatcccatataagttaactgagctgcttctgaatgattccaaatgccaaagacaccgcattcttcgtttaatccactgtagttaaacattctgaaatagctccttcccaaattgctttaatatctgagactttttctgtaattgtagatgtagtattagatactttaaattcatcaacatctgttaattcaccaattttaatagctccatcgacatcaagtgtttgtccttctttgactgcaacgacataacgtccttgtgtttcactaaataattgtgcatcagagagttctacttttgcttctaatcctaaattataataagcacttattttagcaagcgtaataagtaaaccgcctttacctacagtttgtacatgagaagcaattccatttctaatagatgtttttattgcttcgccttttgccacttcatcacctaaatcaatttcttcatactcatgattgactttactatataaaagtttttcaatttgacttccaccaaagtcatttcttgtttcccctacaagatataatgtatgtcctgtttctggatgaaaatcatttaaatattgaatatcttcaatgagtcctaccattcctactactggtgtagggaaaatagaagttcctctagtttcgttatataaagaaacgtttcctgatactactggtgtttttaatacttcacaagcttctgccatcccttttgtagaatcaatcaattgttgataaatgtctttcttttctggagaaccataatttaaacagtctgtcatagctaatggtgttgcgcctacagcaattaaatttctataagcttctgccacaaccatttttccaccttcgtaaggttgattaaatacatatcgagcttcaccatcaatggttgaagcaatagctttatttgttccttcaactcttactacagatgattgtagtccaggtttaataatggtattagcacctacttgttgatcgtattgctcatataaataatgttttgaagcaattgttggatgctttaataatttcttaaatacatcttgtacattgatctcactataatcattttttgaagtattatattctttttcttcaccttctaaaatatagacaggtgcttcatcagctagtgcatcaacaggaatatctgcatatacttcatcttcgtatttaagaacgaagcggtcagtattcgttacttcaccaattactgcactatcaagttcatgtttatcaaataagtccaagaatttttgttctgttcccttttcaacaacaagtaacattctttcttgggtttcagataacatcatttcatatggtgagattcctggttcacgtgttgggacttgatctaagtgcagtactaatccactaccgcctttagcagccatttctgatgaagaagaggtaagacctgctgctcccatatcttggatacctacaagttcatcaaaagtgattgcttcaagtgtggcttccattaattttttacctacaaaagggtcaccaatttgtactgaaggtcgtttactttcactttcttcagttaattcttcagatgcaaatgtggcaccatgaataccatcgcgtccagttttaaggcctacataaatgactgaatttccttcacctttagcagtacctttttgtaccatatcatgatcgataacacctacacacattgcattgacaagtggatttccatcgtaacgttcatcgaattcgatttctcctgctgtagttggtataccaatacaattaccgtaaccaccaataccacggacaacgccttttaataaacgttgattttgttttactgataattcaccgaatcgcaaactatttagtaggttaatgggtcttgctccaatcgatacaatatctctgatgatacctcctacaccagtagctgcaccttgataaggttcgattgctgaaggatgattgtgagattctactttgaaaaccaccgcttgattatcaccaatatctacaactccagcaccttcgcctggtcccataagaacatgctcaccagttgtcgggaattgctttaagaaaggtttagaatgtttataagagcaatgttcactccacatgactgagaaaatacctacttctgtaaagttaggctctcttcctaaaatttcacgtaccttattatattcttcatcacttaaacccatgtcttgatatagtttttcaagtttaatttcttcaatactaggttcgataaacttagacattttgttccctccaactatttaccattgcttcgaataatttgacaccactgtctgtaccaagaagtgtttcaagtgctctttcaggatgaggcatcattccacatacattgcctgctttatttacaatacctgcaatatgttcatgagacccattcgggttatcttcatatgttaaaataatttgattattttcaactaattcattgtacatatcatctgtacaataataatgtccttctccatgtgctacaggataaacaacaatttcattttctccatataaattagtaaaaggagtttgattattaacaactttcagtttttcatttctactaataaatagatgtgaatcattatgtaataaggcgccgggtaatagtcctatctcagttaaaatctggaatccattacatacacctaaaacgggcttaccttcactggcaaaacgtttcacttcgctaataattggagcgacacttgccatagcccccgaacgtaaatagtcaccaaatgaaaaaccacctggaattaataccccgtcaaaaccatttaaagatgtttcacgataatctacatattcagcttctgcacctgttttaatagctgcattatacatatctctatcacagttagatcctggaaaaacgagaactgcaaatttcatattatgcattctccttttcatcaacaattttataactatattcttcaataaccgtattagcaaataacttttcgcttaatgtcgtaataatattatttactgcttcatctgtagcttcatcaacagtcatatataatactttacctactctaatgtcattaacttgtttataacctaagtcatgcacagcgcgatttaatgcttgaccttgtgtatctaatacctgtggttgtaatgtaatgtgaagttcaattgttttcattattttagttcctccaatttatccaaaaatgtttgatacgtatctattaaagaaccagtatcgtttctatatacatctttatcgaaattcgtatctgagtatttatcccaaatacgacaagtatctggtgaaatttcatccgctaataaaatatcaccattttctgtttttccaaattcaactttaaaatctactaatcttaaatccatttcattcattaattgaattaatactttattaatatttttagccatatcttttaatgttttaatttcctcatcattagcaatatgaagtaatttgacatgatcatcagtaatcaaaggatcatttaaatcgtcatttttataaaagaactctacaagtggttcatcaaatacgtggcctttttcaaaacctaaacgtttcgtaatagaacctgttgcgatatttcttacaactacttctaatggtataatctttacttctttaactaattgctcagtttcagaaagctgtttaataaaatgactttcaataccatgtttatttaaatattcaaaaataattgaagtaattcgattatttaaacgtcccttcccttgcatcttatcctttttagcgccgttacctgctgtgacttcatctttgtattcaactctcaactgatgtactgtttctgttgaaaatactcttttcgctttaccttcataacgtaatgacattgattattctctccctttaaattgtttcaacatttcattttcagtttcattaacattatttgtaagaatggtcatatgtcccatttttctatctggttttcgttctgtttttccatagatgtggacatgccattcaggatgatctccaaatttatcttctaataagtctaaatcgcgtcctaataaattcatcatcactgctggttttaaaatttctatctcttgaggtaaatcttgaccagttactgctaaaatgtgtgtatcaaattgagaataatcacatgcttcaatcgtataatgtccagagttatgtggtctcggtgcaatctcatttacatataagtgatttgatttatcaataaagaattccacggtaaaagtaccaacaaagtgaactttttcaattattttatttacttcttttctcgcttcttgttctttatcgcatctagctggaataatagttttaaatagtatttgattacgatgctcattttcttgtagtgggaaataagcaatttgattttgattaccaatcgttacagttaaagatacttctcgatcgagatctaaaaatttttctgccacacattcatgttttgaaacaagcgctttagcttcttcaatattggaatcatttttcactaaaatttgccctttaccatcatatccaccaaaacgtgtttttacgataaatggataacttaatgtttcaattgcttgattcaaatctttttcatcttttaaagatacataaggaacaatttttgtacctgcagattctaatgtttgtttttcagttaaacgatcttgtaataattcaattgcttgataactttggggaatgttaaattgttgagttagttgcttaagctgttgagcagatatattttcaaattcataagtaatcacatctgattgttgacccaatttatttaaggcttcttcatcatcatactctgctgtgataaaaacatctgctactgatttacatggactatctggattagaatctaaacacgctacattaaaacccattttttgggcagattgtgccatcatcttacctaattgtcctccaccaataataccaatcgttgctccgaactttaatctattgaagttcatcttgcatttcgcctaccttatctactaaagattgttcatattgttcaagatgtttacgaactgagtcatttccaatacttaaaattctcgctgctaaaataccagcatttttagctccagatttaccgattgccgttgtagcaacaggaattccaccgggcatttgaacaatagataatagtgaatctagtccttttaaacttttagattcaataggtacaccgataacaggtaacgttgtcattgaagcaaccattccaggtaaatgtgctgcaccaccagcgccagcaataataacgtcataaccatttgtacgtgcttcacttgcaaaatcaaacattaattttggcgtacgatgtgctgacactactttcttttcatatggtatttcaaattgttctaacattgcacaactttcttgcataatcttccagtctgaggaactacccataatgactgctactttcactttgtacaccctttcaaagtttaaaatataaatcttattagttgtatattacacgtatagcataccaagtataaaatttaatttcaatcaaaaatcgaactttattcgtgttttttaacttaatttacgttttctagttaaaatttgacgtttttatacctttaaagttaatctatagacagatatttaataaacaaggaggaattttttgtggttgcaaaaattttagatgggaaacatattgcaaaagattataaacaagggttgcaagaccaagttcaaactttaaaagcaaaggaatatacaccaaaattatccgttattttagttgggaatgatggcgcaagtcaaagctatgttaattctaaaaagaaagctgctgaaaaaatagggatgatatctgaaattatccatttagctgaagacacttctgaagaagatgtattaaaagaactagatcgtttaaataatgatgattcggtaagtggcattttagtccaagtacctctacctaaacaggttagcgaacaaaaaattttagaggcaattaatccagaaaaagacgttgatggtttccatccatcaaacattggtaaattatacattgatgaacagacgtttgtcccttgtacgccattaggaattatggaaattttaaaacatgcagatattgatctagaaggtaaaaatgctgtcgtaattggccgaagtcatattgtaggtcaacccgtatctaagttattattacaagcaaatgcgacagtaacgatcttacattcacgtactaaagatatgcatagtcatttaaaaaatgcagatgtaatcgtcagtgcagtaggtaaacctggattagttactaaagacgatgtaaaagaaggcgcagtaattgtagatgtaggtaatactcctgatgaaaatggtaaactaaaaggtgatgtggaatttgaagaagtaaaagaaattgcgggtgctattactccagtaccaggcggtgtaggtcctttaaccattactatggttttaaataatacattattagctgaaaaaatgcgtagaggcattgaataatttaaattcaagcgtttattataaaaaaagagagcgacataatttcacattaattatgccgctctcttttttcaataatatattacatttatactgacacacttaattttggaacaaatgtttcataatgaatatgttcttggcttatgcctatttcttttaatacttcaatcactgattgaataaatttagcacttccacaaacatatacttcactatcattattcacataattttcaagcgtttctttagttaaataacctttagcttgtctatcatataactcatatttcgctttgtcgtagcgttttgaaatatctcttaaatgagaagtgaatggtgtatcattaacgtctccagttacttgaataaactgtgcatgacttccattttcagctacttcatcaaacattgaaacaagtggtgtgacaccaatacccgcaccaataaacaattgtggttgttcttgattaaccacaccaaatggacctactggagctgataagttaatatcatttccttcttttaattcatcatgtaaaatagttgaaacttcaccttcatggtctgtagatacatcacgtttgacagcaaaagttaaatgattgttatcaccactaacaattgaatagtgacgttttgcacgataaggcattttttcactgcttacatcaactgtaatatattctcctggtgtaaattgacttaaatcatattgatctgatactaccgtaaaggctttaatatcagatgaaagttgttcaattttttcaattttaaatggttggaaaccttcccataacattttactataaatatctttttcaacttgaataaatacatcagcaatttcttgatatgcttttttccaagtttgaataataggatgactatcttctaatcctaaaacggctttaattgcttcaattaagttttcacctacgatatcgtatccagctggtggtacttgtaacgcacaatgtttatatgcaatttctttaacaactggcaaaatattttctaaatgctcaatattaactgcagctgctaatacactttgagctaaagcagtagattggaatcctttttgttggttagtttggttaaacatattttttaactctggatgttgttggaacattctattgtaaaaataagaagtaatctctgttcctctttcttgtaatactggaacagtttcttttacaattcctttttcttgttctgttaacatgcaaatccactcctacttaaaataatatgtgtaaaatatagttatttcccacaaatatattttagtacgatacttattataatgtaatatagtttttttaaattcacagaactttcattttacataaatttaatatttatttatcttaagttcatttaaatttaatcttgaataagctatattaagactatagtatgatgttaaaaatcagaaattaaagtatagttaaattattcaaaagacttattatattcggaggttaacgtaatgaataaactcatacaatctctttcagctctcggtgtctctgctactcttgtgaccccaaatttaagtgcagaagctactacaaatcatactccacagcttaaaggagtaaatgatattgttattgaaaaaggtcaagattataatgtattaaatggaattagcgcctacgataaagaagatggcgatttaacacataaaattacagttgatggtcacttagatacgtcaaaagtaggtacatatgaagtaagatataatgtcatcgactcagagggagccgaagaatcatcaacacgttacataaaagttaaataaatgtgtcaattttctgaaaaagacgagataaacatcttgtcttttttatttaatttttattgtaaacgctagaattgataatgtttctcaaatgtaacgactgattttctatttttgacatttttcacagaatagacacataattttaacaaaccttacattccccgtcattcctattgttactagttttttcctatttattattgtaatttttttctaataaggtcttgtaaatatcgcgtaataaactaaaattaatggtaagccctacatttgtagtattaggaggtcaaaaaagtgtcaaaatttaagtcgttgcttcttatgtttggcacactaattttacttagtggttgttcaaacttagaagtgtttaatgcaaaagggccagtagcaagtagtcagaagttcttgattatttactcaatcatcttcatgcttgttattgttgctgttgtacttactatgttcgctgtttttattttcaagtatagttacaataaaaatgacgaatctggtaagatgcaccacaattctttaattgaaacaatttggtttgtggtaccaatcttaatcgtaattgctttagctattccaacagttaaaacattatacgattacgagaaaccacctgaaagtaaagaagacccactagttgtctatgcagttagtgccggatataaatggttctttgcttatccagaacaaaaggttgaaacagtgaatacattaactattcctaaaaaccgtccagttgtatttaaattacaatctatggatacaatgactagtttctggattcctcaattaggtggtcaaaaatatgccatgactggcatgacaatgaattggactttaaaagccgatcaaactggtacattcagaggacgtaactctaactttaatggtgaaggtttctctcgccaaacatttaaagttcactctgtagaccaaaaagatttcgatgcttgggttaaagatgctaaaagtaaaaaaactattagccaagatgagtttgataaacaactcttaccaagtactccaaataaagaattaacatttaatggtactcacatggcattcgtcgatcctgcagctgatccagagtatatcttctatgcatataaacgttacaactatactcaaaaagatcctaacttcgttgctgaaaaagatctttataaagatgtaacagataaacctcaaaaaccagctcgtaaggtaacagttactaatgtcaactatcctcgtcatggtatgaagccaatgattttaggcaacaatgacccttacgatagtgagtttaaagatgaagaaactcacaacgctaaggaaatggaaaaaatcaataaaggagctaaagacgagaatgcgtctaaagcagataatgatcatggaggtgaacattaatgaattttccatgggatcaattactcgttaaaggtaactggatgattacaatggcacaaatcggcgcgccattcctaattattggtttaattgcggtaattacttatttcaagttatggaaatatctatacaaagaatggttcacatccgtagaccataaaaaaatcggtttaatgtacttaattagtgcagtattaatgttcgttcgtggtggtattgatgcgttattacttcgtactcaattagctattcctgataatactttcttagaatcaaatcactataatgaaatttttagtacgcacggcgttattatgattatctttatggctatgccattcatttttggattatggaatgttgttgttccattacaaattggggctcgtgatgtggcattccctgtaatgaacaacatcagtttctggttattctttgttggtatgattttatttaacctatcatttatcgtaggtggatcaccagcagctggttggacaaactatgctccactagcaggagaatttagtcctggtccaggagttaactactacttagtagcaattcaaatttcaggtatcggtactttaatgacaggtattaacttctttgtaacaatacttagatgtaaaacgcctactatgaaatttatgcaaatgcctatgtttactgtaactacttttattacgacattaatcataattttagcattcccagtattcacagttgttcttgctttaatgacagctgatagagtattcggaactcatttctttacagtagcagatggcggtatgccaatgttatgggcaaacttcttctgggtatgggggcaccctgaagtttatattgttatcttgcctgcatttggtatttattcagaaattattccaacatttgctcgtaaacgtttattcggtcaccaaagtatggtgtgggcaactgctggtatcgcgttcttaagtttcttagtttgggttcaccatttcttcacaatgggtaatggtgctttaattaactcattcttctcaatctcaacgatgttaatcggtgtacctaccggagttaaattatttaactggttattaacattatataaaggacgtattacttttgaatcaccaatgttattctcattagcctttatccctaacttcttattaggtggggttactggtgtaatgttagcaatggcatcagctgactatcaatatcacaacacttatttcttaatagctcatttccactatacattggttaccggtgtagtatttgcctgcctagctggtttaatcttctggtatcctaagatgatgggttataaattaaatgaaaaattaaataaatgggcattctggttattcatgattggatttaatgtatgtttcttaccacaattcattcttggattagacggtatgccacgtcgtttatacacttatatgccatctgatggttggtggttattaaacttaatttcaactatcggtgcattaatgatggcagtcggcttcctattcttagtagtaagcattatctacagccacattaaatctccacgtgaagcaactggagataactgggatggtttaggtcgtactttagagtggtcaacagcttcagctattccacctaaatacaacttcgcaatcactccagattggaatgactatgatacatttgttgatatgaaagaacatggtcgtcatttcttagacaaccataactacaaagacattcatatgcctaataacacgcatactggtgtatttatgggtatattcatgttagttggtggtttcttcttaatcttccaatctatcattccattcctaatttgtgtagctggtatcttcggaactatgatttatcaaagttttgtacaagatcacggttatcatattccagcttctgaagttgctgaaaacgaagcacgtttaagagaagcacgtattaaagaaagggaggctgtaggtcatgagtcatgatacaaacactattgattcacgtacgcatgaaggtcaattgaataagcttggcttctggattttccttacagccgaatttgcattattcggtaccctatttgcaacgttattaacgttgcaacatgggggcagttacggtggtaaaatgacaactgaattgtttgaattaccacttgtcctaattatgacatttgccttattaatcagttcttatacttgtggtattgcaatttactacttacgtaaagaagaaaaaggcaaaatgatgttttggatgattttaacagtaatccttggcttaatatttgtcggattcgaaatttatgaatttgcacattatgcttctgaaggtgtaacacctaaagttggctcttattggtcaagtttcttcatcttattaggtacacatggtgcccatgtttcgttaggtatcgtttggattatttgtttattaatccaagttgcaacacgtggattaaataaatttaatgctccaaaattatttatagtaagtttatactggcacttcttagatgttgtatggatcttcatctttactgccgtatatatgatagggatggtgtatagcggatgaatacaatcgtaaaacatacagttggctttattgcttcaatcgttttaacgttattagcagtttttgtaactctatacacaaacatgacattccatgctaaaacaacaattatctttggttttgctttcattcaagctgcattacaattattaatgttcatgcacttaactgaaggtaaagatggacgtttacaatctgccaaagttatctttgcgattattattactttaatcacagttattggtacttattgggttatgcaaggtggccattctagtcacttataattcaatttctaccttacttaaacaaaaagcctgtacgagttttttaacttgtacaggctttttgttttgtttatattaatgacttctttgtgtatgatagatataagaaaaagtaaaaatctttggaggggtattcatgtcattacctattattattgatactgatccaggtatagatgatgcagcagcaatcgctcttgcattatctcatacaaaatttgatgtcaaaatgatttctactgtaaatggaaatgtaggtgttgagaaaaccacagcgaatgctttaaaattaaagtcctttttcaatagtgaggtccctatacatagaggagcttctcaaccattaataagtgaaatacaagatgctagtcatattcatggagaaagtggtatggatggctatcaattccctacaatttctacttcagatttagcatcttctcatgctgtagaagctatgaatgagatattaagtcattctaatgaacctattactcttgtaactttaggccctttaacaaatatagctctactttttaatacgtatcctgaatgcaaaaactatgttaaagaaattattattatgggggggagtactggaagaggtaatgttactcccctagctgaatttaatatttattgtgatcctgaagcagcccatatcgtttttaatgctggtttacctttaacgatgattggattagatttagcgcgccaatcattatttactcattcttatttagacactcttaaagatgaaaacaaaacgacacaaatgttgtatcatattttccaacactatcgtggtgaagattttaaagaaggaataaaattatatgatgcatttacgattctttatttacttgatcctaagagttacgaaattaaagaagcagatgtgcaaattgaattacaaggggcactgactcgtggtgctactgtagttgattttgaatcttcctatcctaattgttccgtagtcgtatcaagcataaatgaacattataaaacaatatttttaaatactttaaaaaattaaaggtcgaaacaattaatgttccgacctttaattttactcttattgataataagagtgttgatttagtattttatgataaatatatgagattcgcttttcatttgttactttagaattatcacctatatttgaagcaagtacgatgacataatgttgattgaaatagacagtaaatatttgtccatagaacacaccattaattctgttatattgcggtgtaacataaaatccatatcgataagattcaggatatgctgttgttcctaattgctgagtcagtggtattgacactgattcactaaaaatattattatttttaaaattatttactaaatgagccatatcatatgttgtcatatataagttacccgctccataatattgatctaatatatttggtttcatagcagttaatttaccgtcaatcattttatatccagtagccatatgttttttatatggtttttcattaaagaaagcactatgttgtaaactaaatggttgtgctaaatcatcataataatttgcagcataggatttatgtgtaactacttctattacttgagcaagcactaagtaattagcatcattatataagtgtttatgataaaatttttcatcaattccccttgcttgtattgcatgtactgcaccatcaagacttttagttttaggagaagcttcaaatttatatagtccacttctatgtaacattagatcttttaaagttatattttttgtcgttttaaaccaaggtaaatatttagtgagaggatcatttatattcactttattttcattttctaatttttttagaattaatccagttgtaaatttctgtgcggaaccaattaaatacattgtatttggtgagtttttagttttatgctgaaaattttgataaccgtatcctttattcaactttaatttaccattttcaagaactgtaactgccccattaaaatgaattgcttttaaatattcatcaatatttttgatatgtggttcttcgacttcaattgtctttaaatgtggcactttcgatacatgataatctcttttttgtaaatacgttttattatcatttactttgttatattctgtatctttatgatttgttttatatactttcattaagaatatgatgaataatgttactaagatgattaaaactatggttaatgttattatttctattctttttttcatttgctgcctcattacaatttaataaaaataattaactctacgctattttattaaattattattctttcaataaattatattatatattattttcactaaaatatcatctttaatatatcttactccgactattttttccatcattctttagcccgataaagtaagttttcaagcctgcttcattgtaaataaaagtttttaaacattatctttttatattaaaattaagttgtaattttagccaattagtaatacaatttatggctatgggagtaataattattattcttttatattaaaatggtatgattaaattattaacttatttttttaataaatacgtataggagcacataattatgaatcgttttttaaaatattttatgatgctattaacattattacttattgttgttcctgtcatttttattgtcaatttatatcatcattctgagaatgctttgcaatcttcatataataaatctgatgcaaaacgtcattctactttaagaaatagcaaaatgaatccttctaaaaacgctatctcaatattatttcttgggatagacgataatgaaggtagacgtaaaaatggtcaaacaactgaacattcaagaactgattcaatgattttagcaacacttaatcccaataaacagcaaatccgtttattaagtattcctcgtgatacaatcagttatattcctaaagtaggttattacgataaaatcacacacgcacatgcctatggaggtcctattgctgctatggatactgttgaagccacacttaatatccctgtcgactattatgttcgaattaatatggatgcctttgttcaagcggtagataaattaggtggtatttattacgatgtaccttatgatttagatgaacctaacacagatgatactggaagaatcaaggttaaaaaagggtatcacaaattaaatggtgatgaagctttggctgtagcacgcacgcgtcatcacgattcagatttaaaacgtggcgagagacaaatggatttaatcaaaattttatttcagaaagcaaaaaatttagattcatatgacagactagatgaactcgttcaaatagtaggtaaaaatgctaaacataacctaacaacagaagaaattaaatctatagcttcaatttatttatctgataatatagactttaaaaagtctcaacttaaaggtgacaatgattatttaaatggtatctactattataaccctagcattaagagtatattaaaatattcaaatttattgcgttctgatttaggactatctaaaataacagataagaatgatttattggatgaaagagtcattaattattatggcaatctagtaccgttaacacctattgattcgtttcttttagaaaataatcaaaaagataccacaacagatgaaaactctattcagagtaatggtactaacccttctacgcaatcacaatcagaacaaaatccatctgatagtactatggatcaacaaaatcaaatgagtaatcaagtcaatagcaacaattcagacaactcaaacgacttcaacaatcaaaatgaaataaatcaattatattaatttgagaggagtacgtagaatgtcacgcaaaacatatgaaaaaattgctaatattaacggcatgtttaacgtattagaacaacaaattattcatagtcaagacatggctttattcagaagtgaattcttttatgttaatcatgaacatcgtgaaaattatgaggcactattagtatactatggtgagaattcagtgaatccaattgtaaatggcgcttgttacattgttgctttacctgaaatttttaataaagtagatgtatttgaatctgatttacccttttcttgggtatatgatgaaaatggaattacggaaacaatgcaaagcattagtattcctttgcaatatttaattgcagccgctttagaggttacagacgttaatctttttaggccttcaggtttcactatggggatgaataactggaacatcgcacaattaaggatcttttggcaatattgcgcaattgttcgccaagaagcattataatttattactcctttttactttttagtaaaaggagtttttctttttctatatctaaataatataaaatgattgaatttatttaatttaagaaagtaggtaaatgccacatgtttaaagaagtaattaatcaatctatgctttctgattgttttgaaattagaaagtcagtttttgtagaagagcaaggggttccattagaaagcgaattagatatatttgaaaatacttctactcatattattggatattacaacgatcatccatttgcttgtgcacgatttcgtccatatgaagatggtataaaagtagaacgtgtagcaattttaaaaccttatcgcaataaagggttcggtaaaacattaatgaacacgattgaaagtattggaaaacaaaaacatcatcataaacttattttaaacgcacaactacaagctaaaccattctatgaaaaactaggttatattagtattggtcttccttttcaagaagaaaatattgctcatattaaaatgtataaaataatttaaatgatatttttcgatacttgaatttcaatgacaacagctagatatttataagaacaaaattaaatttagtttacaaatgagtaaaaaataattactcttacttttcttgacgttataataaaaaagtaaattaaaaaaggagcaactattatgtcgaaaaaatttagctttaaattcccatcaatgatcgcccttactttatttggtgcagcatttactacacatcatgctgaagcctctgaaaacaaacaaaacgctgctaataatgtaatcgatgatcaacaaaatattgaaaatgccaatgtagctaaacatcaagtcagtaatgcagcacaaaatatttctggagtgcaaacttaccaagaccctacattagtaaaatcaaatactactaataatacatataatacatacacatatgatgcaaaattagataacttaaatcaatcagcgtcatctcaaaataactcaacgcgttctaatactaatgatacagttaaaaacagtgatacaatatcaaattatcaatctgataatacaaaacataataataatgaagtagctactacctctactacttcaactgattcaactaaattagttacatcagaagattctaatcataaattaaattcaaatcgtataactactgaaacaccatcaactcataatgaaagcgctcaagtttcaaatacacataagttaaatacagatgagcctaaaacaacattaaataacgtagaaaatcaaaacaatagcatatcaaaagcgcaattaagcactactgtcgttaataataaacaacaaaaagtagaagataatgctacaacgacaaataatgacaataataaagtatcattatcttctactacagaaagtgacagtacgtctaaaaatttatcaaatacatcagataacactacagttaacaatgaagatactacgcttaaaaagaataatactcaaacttcaccaatgcataatactttaaaagtacgtgcatacagtacagctttaaataacactcatgttaataataaagctacaacttcaactcaatcaaatgatgcatctgtctctgactctacatcatcagttcataaaggtattggtggaaaaggtggtccagctacagtaagtacatattcaactacgtcttcactaccaaaatatgtaccgcaagttaaatcttcaattaataattatattcgcacaaataatttgaaagctccttcgattgaagaacattatacatcttacttccctaaatatggatatcgaaatggagtaggaaaacctgaaggcatcgtcgtgcatgatactgcaaatgacaattcaacgattgaaggcgaaattaattatatgagaaataattatacaaatgcgtttgtacatgcatttgtagatggaaaccgtattattgaaactgctcctactgattatttatcttggggagctggaccatatgggaataatcgttttattaatgttgaaatagttcatacacatgattatgcttcatttgcacgttcaatgaataactatgcagattacgctgctacacaattacaatattatggattaaaaccagatagtgctgaatatgatgctaaaggaacagtatggactcattatgctattagtcgttatcttggaggtacagatcacgctgatccacatgcctacttgagtaatcataattatagttatgatgaattatatgatttaattaacgaaaaatatttaattaaaatgggcaaagttgcaccatggggtacaacatctacaaataattcaactcctactactaaaccaagtataaataataaaaaattaacagtaacatctaataatggcttagctcaaattaaatcagataatagcggtctttatactactgtatatgattctaaggggaaaacgacgaatcaggttcataatactttagcagttacaaaatctgcacagcttgataaagacaaatattacctagtatccgattataatagtggaaaattatatggatgggttaaacaaaatgaaacgatttataatactattactcctaaagcgaaagtaaataaatcttatactattaaacctggaacgacactatacactgttccatggggtaattataatcaaattgctggaacagtatctaaatcaaatcaatctccatttaaagcgagtgcatcacaacaagtaggtaaatcaacatatgtatatggttcagtaaatggtttaactggttgggtaagtaaatattatttaaatgatgttcaaaacaaagcggatacaactaatatacttaatgtttctcaattaaataacactttaggacaagtagctaaaaaaaataatggtgcttacacaacagtatatgactcatctggaaaaataaatccttctattaacggtaatacttatcgtgtaactaaaaaagcgacattaaataacaaaaacttttatttgatttctgactttaatggtaatcaatcacacggttggattccttcatcagaaattaatattcaaactacaacacctataaatgatggtattaaaaaatacaatatcaaagggaatagtaatatatatgaaacaccttggggcagttcgtctcaaattaaagcaacagttccttcaaagggagatgttctaaaatcgatagacgctttaaaagtaggctcaaatacgtatcttcacggtgttattaataatgtttggggctggattttatcagacgatgttcaaactgtaaaaacgagtcaaaaaacaagtagtgttcaaactgtttcaaaaattgctcaagtaaattcaaccaatgatggtatacgttcaagtatttacgatgcaagtggtaagcatgcaaaacaatatgctaacaaaacatatgttgtaactaaagaaaaaaaattagatgatcatacatatgttttattatctagtacttctggaaatactccattaggttggtataatgttaaagacttaaatattaaaaatttagatgaagaacaaaaagtgaaaggtacttatactgtcaaccaaaataataatggcttatatacgattgcttggggcactaatcaacaacgattagataaaaacaacattgctaatcaaactttcaaggcttctaaatcgacaattgttgatggtaaaacgtatttatacggtacagttaataatcaaacaggttggattgcattaaaagatttaacaaacgcttcatctttcgatacagcagaagactataacgatgatttagttataactaatggtaatagtttttactatgacgaccctacttcagctaaagcgtactcactcaagccatttaatgaacaaatttttcaaattacaaaacgaaaagtagtaaatggtatcacttggtattatggtaaattaagtaatggtaaatcagtatggattaagaaaagcgatttacaacaacaattagttaaactatctaaaaactatagaacacttgatgaggtcactaaaattcaacacaatgtttacggtacaccaccacaagttcaacgtaataatagcggttggtcaaatgcaacgtatagtgaaattaaaaatgcgatgaacgcgaaaacacttgcaaaaaatccagctttaaaatatcaatttttacgtttagatcgtccacaattattatctgtagatcgtttaaatcgactacttaaaggtaagggaatgttagaaaaccaaggtcaagcatttgctaatgctgcaaaattgacaggtgttaatgaaatttacttaattgctcatgccttacttgaaacgggtaatggccaatctaaacttgctaaaggtgcaaatttggttaataatcaagtcgtttctaattcccctattaaatattataatgtatatggtattggagcttatgattatgcaccacttgtaaatggaattaattacgcaaaacaatctggctggaatagtatttctaaagctattattgatggagctaaatttattgctcaagattatattaaatctggtcaaaatacactttataaaatgcgttggaaccctgatcaacctggtacacatcaatatgctactgatattaattgggcaaatttgaatgctaaaagtttaaaatacttatatgatcaaattaattcagttggtaaatattttgaaataccagtatttaatcaataataatacttgggagttagactgaattcagtttcaattcagttatcgcctgcccatatgtaaaagaatctgagacacttatttctgtctcagattcttttttgctctaaattttatatttaatacaaacacccatcttattgtgctatgttataaagaacaataagatgggtgctatgttagatataaagatgacgactattaagtttatttaaaagatgattcaaattattgatttcctcttctgttaaacattgacatctcgcttcgattaattcacatcttgctatattgatttgtttaattaaatctctagcttcagttgttaaacataaatccttacaacgtaaatcttcatgtgactgttgacttgtaatataacctttatgaactaatttctttatccaacgagatacaatggattgctctctactaattttcattgttaaatcatattgtgataatcgatcatagttataaagaattcttaataattccagttggtcatttgttatatcagtccgttggccaaagcgtctatttactaaattaagatcattatttgttagggtaataagtttttctagttgattatacatagctgttctactccactctagtaattgtttatattataaagttaattttataattagacaatactattcaataaattgactaaattcattttaataatatggtattatctattcattatacacgatttctaatttttctatttaaattaagagaaagtgagattttattaattaaatattataaataaaaatatgatatgataattatattctatttcaaagtaatgaggtcataatactttgaatgattatatttagaggtgtaaatatgaaattaactttaaattcaaattctaagtttttaagagcgccaagtatccgacagttttcaagtcgaataaaaaatattgacgactgcgttaatttaactattggccaacctgattttccaatgcctgatgtggttaagcaagcatatattaatgcaataagcgaagataaaacaagttattcacataacaaaggccttactgaaacgcgtcaagcgattagtcaatattttaaacgtagatatggatttctttatagcgaagaagaaattattgttacaaacggtgcaagtgaagcgttagatacatcgctaagaagtataatcgaacctggagatgaaattttaatccctggtcctatttatgctggatatatcccattagttgaaactttaggtggtaaacctatttatattgataccacacattctgactttaaggtaacacctgagctaattgaagcttactttactgatcaaactaaagcaattttattaaattatcctactaatccaactggtgttatattagagcgctcagaagttgaagcccttgtacattatttaaaaactaaagaaatatttattatcagtgatgaaatctacgctgaaaatacgtttacaggaacacatacttcttttgcagaatatgaagagatacgtgatcaactattactcattggtggcttaagtaaatcgcattcagctacaggcatccgtatcggttttttaatcggtcctgaatatttaattgaaaaattaactttcatgcatgcatataactgtatttgtgctaatgttcctgctcaaattgcttgtatcactgcattaaatgagggcttagaagcaccaaaatatatgaacgaagcttatattgaacgacgtgattatttaaaagctaaattgttatcgctaggattcgaacttgaagctcaacctgaaggtgcattttatattttcccaagtattaaacgatttactaataatgattttgacttttgtgtcaatgtactggaagaggcacatgttgcgatggtaccaggatcttcttttacagatataggaaaaggctatattcgtatttcttatgcttatgaaatgaacgtcttaaaagaaggtatgcgccgtttagaattatatttaaaagaacactatcctaatgtgttagataattaaaaaaacgcaagattgactaagtcaattttgcgtttttttattactattgtttatgggaatttagggaattgatcaaaatcaggatcgcgtttttctttaaatgcgtcacgaccttcttttgcttcatcagtagtgtaatacagtaatgtagcatctccagccatttgttgtaaaccagctaaaccatctgtatctgcattcattgcagcttttaagaaacgtaatgctgttggtgaatgtttcataatatctttacaccaagcaactgtttcatcttctactttatctaaaggtactacagtattaactaagcccatttctaatgcctcttgagcattgtattgacgacataagtaccaaatttcacgtgcttttttgtggcctacgatacgagctaagtatcctgaaccataaccagcatcaaatgaccctactttaggtccagtttgaccaaagattgcattatctgcagcaattgttaagtcacatactacatttaatacgttacctccaccaattgcataacctctaaccattgcaataactggtttaggaataacacgaattaaacgttgtaaatccaatacatttaaacgaggaatttggtcttcaccaacataaccaccatgtccacgtttcttttgatctccgcctgaacaaaacgctttatcgccttcacctgttaagataataacagaaacattttgatcatcacgtgctctagtaaatgcatcaatcatttcagctactgttttaggtgtaaatgcattacgtacttctggacggttaattgttacttttgcaattccttcgaagaattcatatttaatttcatcatattcttttagtgtttcccactgtctagtcattttgctcctcctttaaaaaacctaatactattgtatcaaattctgcttcatcttccacatgaattgtgtgacctacatttttaaaaatatggatttgatagtttttaatttcttgtgccatttttttagcagtattaacgaatttttcatctaattctcctgctaaaataagacaatcactttttatacgcttaatatctccccataaattaggcatatgtccagtcccataatctcttaaagctttcgctaatttattgggattctgcgcaagtcgcatacgacgcattgccttttttttattatcatctaatagatattgtgtttgaaataaagggagtttttcccaatcatttacaaatacttcaattccagctatttctaatacacgtccacgtgcttgatcgatagcctgtcgttctttacgtaaagcttcgttagcaatgcctggtgatgtactttctaatattaattgtttgatttcatattgaccatgtatttcatagtagagtgctacgcgcccacccattgaatagcctaataaactgaatttatatttctcaaattgagataaaactcgatttatttgttccgttatatacggaaagtcccatatttgatctgtaggtgagtcatctttgccatgtccaggtaaatcaatagttaaaacattacattgagtaagaaacgcctctatatgattcatataagtttgactgtcactaataaaaccatgaagtaaaattaataattgattgcttggatgctcagacttataaaaattataatgtaacatttaaaatctcactcaatttcttatataaaagttgatgttgttctaagttatcttcacgatttgtaagaatttcgtatatatatgaattcatagttgaaaaagatacttgagaaaaatcggtaatattatttaaacgtttaaatgaaaagtcatataacatggcagtgtactcaaaatttagtccagttggtgtaccaaatagacgttcaaagtattgctctgctgctgttttttgaggcaaataagaaaatatccctccaccatcgttgttaagtataacaacattaatatgaatatcgtttaatttagccattaataatccattcatatcatgataaaaagctaaatctccaatcagtaatgtcacttttttatgtactgccatacctaaagcagtagaaataacaccatcaataccatttgcacctcgattagcatacacttctacttcactatcaaataataaattatctacatcacgaataggcatactattacttacaaataatgcatcatctttagtgagtttttgaatcagtgtacttacaaatgctgattcatctgtcgcttgagacatatgttgagtgattgctttacgagattgtgcttctattgactgccaacgttcaatccaatccttacggtttactgttggttcattcactaaacttctgaagaaatcatttgctgatatttcatatgagatgtgtggtggtgttggaaatacatcaattttatcattattttgaactaatatttgaaatgcatttgtgcgtgtaagccattgatttaattttttagaaataactggtttacctacacgtataataaaatcagcatcaatatttaaatgagaacggtataataaatcatatgttgtaatgacattaggatgattatacttacgtaattgactaagtggatctgcaagaattggtaagtcatgaattgtagcgtaagttaaaatttgatcgactgcttggtgctgcatgtcccctacaataatcaggcctttcttatcttttaatatattttttatatcttgtatatctatatttttttgataatgaggcaatattttatgttcagattttaaattctcagtcatttcaagatctggtgttaacggttctctaaatggcaaattaaaatgtattggaccacggtgtgggccatataaatattgacttgcaatttgcatttgataattaatagtattcagcatttcttgactgccatcagctacaggcatatcaaattggaagttaatataatttgcaaacatattgacttggttaatcgcttgtggtgcacctacacttctaagttcatgtggacgatcgctagtcaatactataagcggtatacggctgatttgactttcagctatagctggcgtgtaattagcagccgctgttccagaagtacataaaatcgcaactgggcgttcgctccctttaattaatcctaaggcaaaaaaagctgcgctacgttcatcaggatgtatccaagttttaatatttggatgcgcttcaaatgcaatcgctaaaggagtcgaacgtgagcccggactaataacgacttctcgcacaccataggcatataactctgatgcaaatgtataaacttgtttagttaaagcttctttatgattcattcttattcactactcctaaagcattcatcattggtgaaaatttcaccgacgtttcttcaacttcactttcagcattagaatcttttacaataccacaacctgcaaacaaagtagtttgattttgtttaattaacatagaacgaatagccacaataaattcacaatcatcatctacgtcaatatatccaactggagacccatataatcctcgtgtaccaaattcatttttttcaatatagtcaactgcttctttcttaggataaccccctaaggcaggtgtaggatgcaactcatcaattaaactaatatacgaatgattcaataatgttccttttatttcagtatacaaatgatacatatgatcattttttaaaatattaggtttttgattgtactctacattttctacataaggcttaatatcatttaaaatgcttctaacgacaaattgatgttcacctagatttttactgtcttgtagaaatgcttgaacatttttttcatctttttcagcatcttgtgttcgaggaattgttcctgctacagcctttgtagataatacaccgtcctcaacttttaataattgttctggtgtttgagaaaagaatacagattggttagactctaggataaataagtaactatttttctcattgtttaacgcacgattaagtacataaggaatactaattggcttatcaaacttaattaagcgacgtctcgcaagtactacttttttatctttatcaagttgttcaatcgtatgacttacaagatctttccattcatcaacataaatatcttccatgcgtgttacattgcctaaagctgtctctcgttctgtcgtatcaacttgagcattttcgaaataattaatcatttgatttaatttttccatttcaaattgagctttttcaactgtatatgtcaaaatggtttgattgttaactgaagaaataagtacttcaggtaccacaaaatgattaatcccaaattcacgccactcatcatcagatttatgatttgaaaattggaatccccctactattttaaggtgatgcttttgcgtattaacatgaattagttctacatcatttttaaatttttcccattcccgaaagatagattgtttattttcaaagttattcttaaatctttgaattgcatgatagccgaaaaatgaagacatattatcgtttaatcgcaaataaaatcgatctccagcttgtttttcagttaaattaaataattcacttggtgttaaagatttatttaacacgacttcaacagaaacccagtttttattgctttcatatatagattccaaaattttgtcttccattaggttagcagccattcatttcacttctttcattatcttttttttactcattaaaatattgtaacatttttcgttattcatcgtattataattgcttaatcaatttagagaaatatttcacgttgattgacctttcttacctattcctttaaaatacatatgttaaaactttatattataagaggtagattatattatggcagatcaatatcaacaatattcaactgttagaaaatattggcatttaatgagacctcatactttaaccgcgtctattgtccctgtattagtaggaacagcgacagctaaacttttcttactgggcagtcaagatcatattaaattcagcctatttttagcaatgttaatcgcatgtcttttaattcaagcagcgactaatatgtttaatgaatattatgattttaaaaaaggattagacgatcatacatctgtaggtatcggtggcgcgattgttcgaaatggtatgagtccaaaacttgtcatgaatctagcaattgctttttatattattgccgctttacttggtatatatctagctgctaatagttcattttggattattccagttggtattgtatgtatggcaattggttatttatatactggtggacctattcctatttcatggacgccatttggtgaattattctccggattatttatgggtatgattatcattttacttgcattctttattcaaacaggtaatgtcaatggttttgttgtttggattagcttacctattgttattacaatcgggttaattaatatggctaataacattcgtgaccgtgttaaagataaagcaagtggtcgtaaaaccttacctattttattaggtaaaaaagcttctattacgtttatggcagcaatgtatatcttagcttacttaatcgtaatatttactgctttattcaaatcaggcggctcattattctacttgttagtattattctcattcccaatgccaatcaaagcaattcgtcgttttaataaaaatgatacaccagcaagcatgatgccagcgatggcagcgactggcaaaacgaatacagtctttggtattttgtacgctttgggtatttatatcagcgcacttttaggtggaatctaatttattttaactagcattgttttttaacaatgctagtttttttattattatatatatatcatatgtagataatcatggccatataaattaatatcttcaacccatttgaaacctagttgtttataaagtttaagtgctttctcattattataatcacaatttaaactccattttttattagaacttgtggtgatcaaatgttccaacaattgtgtcgcaataccttgtcctctataatcaggcgatgtgaccactgcttcaatataccactcatcatttttagcttcttttataggtaaaggtgttccaactaatctgatatcttcttcaagaggcagttggttccattgttcttcgtactccatttcttttgaaccatcataagcgataatacaaccggccaattcattattcttttcatatacccatatatttttataataggtacgataatgtacattaactatactaagttcaagcaaattgatcatacgttttttagaaatttcctttacaatgtcaagttccatatctttccatattaaataataaagttttgcaatttgcttattatcactcggtgtcgcttttctaatcatatttatccctccatctacatcatactcatattattacaagaaattaaatattatagtaagtataaactgattcttttataagtgccgttcttgattttagtcataaattacttacaatatgaaaataaggaggcatccataatatgagagtaaacaaaacattgtatgtattatgcgcattgttcttaggtggtgttgggattcacaagttctatgcggataaagttggacaaggcgtattacatttggtctttttttggacacttattccaacaattatttcgattattcatggcataatcattatcttcactactacagctgataataatggatatatttttatacccagataaaaaacaaccaaaagtatttaaactttcttctttaaattaaagaaaatggggtataaattaataatagttttaaaaaggagaatgtgactatgaaaaactttattaaacgtattgtgagaacaattattacaggatatgtattaaaatggattaaaaataaaatagaaggaaattcaaaaagaaaataatttaaaaaggtctattcactttattttagagaatagacctttttataatgactcattggaaccggatttactcattgagaaatgcctccaaatgttttaattcagtagtatattgattaaaatcatcttcatttctattaaccaaggcttcatcaattaatgttacaagttgtttctttctttctaaacgtaaagcttcgtcaatcacaagttctacacctaaatcattcatcgtcgttacaaattcttctagtgtggtatgtttaacatttgtattgtaatacataaaattcactacctttctattaatttaaaaatagtatacaagctttttattttgaaatcaatgaatattcagacttttctaaataaaatagtgtaattttattttcaaataataacttgacaacatatactttttttatataataattttatattattaatcactcttcgtttttaataataaataattaaataaggagctgatcttatgactcagttcaataaaccacctaatacgatttatgtcatacgtaaaggtgatatggtgattagacctacatttgacaatcatcaacaaccgaacggctcagaaatcctcaaattcgatacctcacgagaaataagcctttttaaaactcaaaaaattattgaacgatcatgtagattttatggcaataactacttaagcaagaaagctgaaactcaacgcatcgctggaataactagtaaacctcccatccttctcacaccattgtttccaacttactttttcccaacacattcagaccgtttagaagaaaatatatggattaatatgcattatatttctgatattaagccattaaagaacagaaagagtaaaattatctttgcaaaccaagaagcactaacattaaatgtatcttttcatagtttatggcatcaatattctaattctattttctattactatatgattgataaacaagcaagaatgaagtctaataatccagatatgccaatcgattatgaaaaaacatctttaaatatttttgaggccctttcacactattctttattagaagataaatagctgtatgtttatttttaaaatatacggaacgattatattaatttagtgtaaatgttccgtatattttttaaagattatctcttgcaaattttaatattattgatataattgtatttgtgttgattaaagaacacgttatattattccgcagtagctcagtggtagagctatcggctgttaaccgatcggtcgtaggttcgaatcctacctgcggagccatatggaaacgtactcaagttggctgaagaggcgcccctgctaagggtgtaggtcgcgagagcggcgcgagggttcgaatccctccgtttccgtcatttaactctttactttttaagtaaagagtttttttatataaaaaaagagccattgtttctacaatttgactcctcttttatattgaaactaatacgccattaatttcaatatactgtctttatcaatatcaccaaagtaatgataaaagtcatagtcttccattacttcttttatatgagtataatcgtgtaatgttcctactaaagcatcttctaattcattgacatttccttctccaaagaaatcgccaaagattttagcatgttcaatttttccttttttgacatcaaatttaacttgaatgaatcctttttcaaacttctcgtcccgttcaaaattatatttaggatttttaccataattccaatcccaagtacgatatttttcattgcttaattgcttaatattgttccaatcttctttcgttaaatgatattcctctacttcatgctcaccaaagatggtttttaaaataatttgcttaaattgatcaattgtaatagagtcatctaaaaattcttcaatatttgctacgcgtttacgtacagacttcacacctttagattgaatttttttagggttcacttttaaagcgttttgtacttcttctaaatcgctatttagcattaatgtaccatgactaaacatacgatttttaaccttaaccatagcatttccggaaattttagctgcgcctacttgaatgtcattacggcctgtcatttctgcatctacacccatagattgtaaagcttgaacaataggctcagtgaatttcttaaagttatgaaaactgttaccatcatcactcgttacaaagctaaaattcaaatttcctttatcatgatacacagctcctcctccagaaattcgtcgtacaacatgaatatgatgatcatctatatactgtttattaacttcttcaattgtattttgatttttacctacaatgattgagggttcattaacataaaataaaaagtaactatcatctgcaggtaaatgtttaagtacatattcttccatagctaggttaattgtagggtcagtaatattattattacttacaaatttcatagtactcacctttctctttcttttaaaatttaataatgcaatacatcatccattatcgattgtttaacttaattatggcattattttcaaaaataatataatattttctaattttagtatatatttgtttatttgtagtgtaaattttagtacaatatagtctagctatgatttgaggaggactcgaaatgactgttgcagaagttggaaatattgtagaattttatgacggtttaagaggccgtgttgaaaaaattaatgataattcagttattgttgatttgacaattatggaaaattttaatgaactagatttacctgaaaaaacagttattaatcacaaacgatataaaatcgttgaataagaaggttaatattaaatgaaaaatacatctaaacccttaatttggtttgttgcaagttttattgtatttcatctcatcttatttataatgtggggagaacatcaagaatattggtatttatatactggtataatgttaattgctggcattagttatgtattttatcaacgggatatcacatcaaaacgtctattaacctctattggtgtgggagtaatcacaggtgttgtattagtgataatacaacttatattttcacttatatcgtcacaaattacttataccgaattaattaaagaattatcaagaacgggtgtatattttaaatggcaaatgttaattactatcttatttgtcattccttgtcatgagttatacatgcgtgctgtcttacaaaaagagttaaataaattcagactacctcgctggataacaattttaatacctgcattatgttctagttctttatttatctatcttgataaatggtggattgttatttttatctttatagctcaagtcatattatcattgagttatcagtatacaagacgtattgttacatcgtctttaggtcaaattgttgccatcattttattacttatttttcatggataaaaaccttttcttagttgctaaaactaagaaaaggttttttgattggtatcacgattcatttcaataacgatattactttttcatttaaaacataactatctatatacaaaaaagagtgggataacgaattcaaaatgaatgtatcccactttcctttctctgtttatccaatttgaattctttcttttggataactaaatttatcaggttctttacgcccagatatcataataataaatgatattaaaccgacacgtcctataaacataagaagcattaagactaccttagtaatactgctaatattatctgtcaccccaagtgataggccacatgttccaaatgcagacatgacttcaaaaaatacctgtaagaatgataaattattggcttctgctgctaatataataatgatacttacaaaagtaagtactgtcgccattataaacacagcaaaagaacgctgtatatcgatggtatgaatttctctattaaatactttaatcgatgatttttctgtattgttattaaaattaatcacaaataaaataagtatcgcaaatgtcgttgttcgaatacctcctcctactgaactcggagaagatccaataaacatgagaatactcataatgacatttgttgcatcactaaagtatgtcacatcaatggtttgtaatccagcactacgtgtagttgcagattgaaataatgcatagaataaagattgatgccaattatatcctttgaatgcatgattgtactcaagtgctaaaatagataaaaatccagatataaataagaaaaagtaagtagttgttgtaattttagtaaataaagaaaatctaaaatgacttactctatttcgtatataagctctgatttcaagtaatactggaaaaccaattgatccaagaataattaaaaacattacaatagtttgtacaaagtaatccttggcatatggaactagcgattgaccagtaatatctaacccaccatttgtagtagctgaaatagatacaaacaaaccttgcattaaagcatttttcaaatcaggattgtctctgtaaaaataaaatgcaagcaagagtgcacctacaatttcgatagtcatgattgttttaacaatttcaataataagcttaactgtcccactcattgtgtctttattattatcaagcataataagttgacgttcgcgcataccaatgtgtttaccaagtactacccacaacactgtacctatcgccattacgcctatgccaccgatgtttaagataattaaaatgataagttggccaaatgatgaataggtatcaataatactgactggcgttaaaccggtcacactaattccagatacagctacaaacaacgtatctataggacttaccttcacgccaggtttatgtacaaaaggtaaattgagtaataaaaatgcaacgacaattgcaattaaataatataaaacaataccttgttgaggcgttgattttttgaataatttactgaaaatagacattagtttgtcacctcaatgtcatttcaaattaatttctatatcttgaatatttccatctctgtaaattttagccgataacgtttttaaatcttgtcgatggttaaacaggatgtgtctatactgcaaattatcttttaatgttttaccttctaattttacaatgacatcaccaatttttaaacctgattttttacctaaaccgccatcttttaattttttcactaaaatcccatcatttatatcattaggtaattttaaaagtgagcgttcataatgatttaaatcattcacattttctaaagctattccagtattgggataatttactttcccatttttttcaagctctttagcaattgatttagcttcattaatgggaatagcaaaacccattccttctatacttggcatattaatttttaatgagacgataccaataagctccccatctttattaactacagctccacctgaatgtcctggattaacggaagcatcaatttgaaacgtttgcatcaattcatcatttttattatctttatcaaaatcaacaggaaccaatcgatttaaccctgaaataatccctttagataccgtatttctaaactcttctcctagaggattacctacaattaatatcgattcccctaaaactaatttatttgaatttccaatatggataggtttaatatttttattattgatttttgcttttactactgcaatatctgaccatttatcttttccgacaacgtcaccttttatacttttattctctccatatgtaatcttaactttatccgcttcaccaacaatatgcgtatttgttaatacaaaaaaagtatcgcctacagttttgtagacgacacctgagccaagttcattatctgattttgaatttgttgtttgaactgaaatattcttaggtgcgtcactttctactgttaccactgatctgacagtattattagcgtttttcatagttgttgtgtacttcttatcttgtgtatgtgtttgatttgaatgttgctcttgagaaggttcagtaaaaatagcttttactaaaactaagattaatattaaagcaattgcgattaaaattttaatccaatgttcttttaaaaagtcaacgatcttattttgtgtatcatttgctgattgttcatgtgattcatgaggttgttgatccgatatattttctgtcgtattcttatcagaattagatatgtgctttgattgttcactcttagtatgttctacttgagttgaatgttgctgagttgacatttgttctttctcagtatcgattgattctttatccttagttgaagtgtatgattcttcagttattgttggatgtttagattgtgttttaattgtatcattatgctgattgtctttttcttttttagacttttgacgagattcattatttttattcaatctactataagttggttctatagatttattcgtttcattttcactttttgagccattactcgaaattggtttttgctgtttcaatttctcattatgtatgtcttcttgtttaagatgttgttcttcaggcagagttaaatgatgcctattatttttcttagctgtttttgatgcatctctttttgatcttaacttagctaaatgttgttgttgttgaatttcttcttgtgttaatttctcaattctagcttttcttaaattatctttgacacgttcttcatttacttttgcttgatgctgttctttttccgctaaatgttcacgcttttgtctttcacgttcaatacgttcctcgcgttcttcattatgaaagtattcgtgacgtttacgcccatatttactacgcggtatcacttgttttttatcattatccaaagatgcccactcctaaccttgaaatcacaatatatatcactaaaaaaatgatttacttttatgtggttatatatctatctgaattaatttatatattacttaaattttaatatcattagtgttaataagcaaacgattgtcaaatattttctaaaaatattatacgaatagttattaattgaaaaaaccttttgaagtctcttataaaaaacttcaaaaggtatcgattatatctaatgcttagcattctttttattttttcgtactgatgttaaccatccaatcacaactaataaaatcattacagtccagaagattgcttgccataacgtactatgtgggaaatcttctgataatacgccaatatctggatgagctaatacgataactactaatttaatacctacccagccaacaattgcgaaagcggcaccttctaaacctggatatttatttaataaatcaacaaaccatgttgctgcaaaacgcattaaaataacaccaatcatacccccgatgaacatgactccaaattgacctaaatccattccgccaaaatgaatacccatcttaggaagtgtcactgcaatagccattgctgctaacatagaatcaattgcaaaggcaatgtcagcaaactctactttaaatacggtagcccaaaattttccagcacttactttcttttcagcgccagtttcatcataatgatgttcatccccaacttgttcctcttcatctttcttatggaagaaattccaaagatttctaatagacatgaaaattaagtatgcagcaccaatcgcttgaataaaccagaaattcacaataatactaattaaaaataaagcaataaaacggaaaataaatgctcctagtaaaccatagaataatgcttttttacgctgcgctggtggtaaatgcttaaccattactgccattacaaccgcgttatctgctgctagtaatccttctaaaaatactaacactaatattacccacaaataaggtaaaattaagcttggatccatgaaaagacagctcctttatttattttttacaaataaaaagacctatgctaattcatagcaaaggtctcacttagcaaatttgctcattttaccggaagtatcaacttcgtaatgacgataaaatgctgaatttaagatgttagtaatatagcccctcaaattctcaagttactcccctctgacattaagtcataggtatttatttgttaagagtattataaccagatttggtatatataaacaatgttaaagctaaaaatattgtatctctttattattattttaaattaaaccttatattgtcattttttataataaactatatagtttaatatctgggaatttttcttcaaaccaacgtgtagcaaattcattttcaaataagaaaacaaacttatcatatctgtctttcactaaaatagaacgtgacgtgttcatcttatcttgaatatcctcttcattttcaatccaacgtgcaatttttctacctacaggttccatgacgacatcgacattgtattcatttttcattctgtgctcgaatacttcaaattgtaattgacccactgcaccgagaataatttgattcgtatgaagtgttttataatattgaatcgcaccttcttgcacaagctgttcaattcccttatggaaatgtttttgtttcataacatttttagcagagactttcatgaaaatttcaggtgtaaattgtggtaaatcttggaaattaaatttttgtttacctccaactaatgtatcaccaatttggtagttacctgtatcgtataatccaataatatctccagctacagcgtgattgacggtttctttatcatctgccataaaagaggtagagcgtgtgattttttgttttttattggtacgttgcaaggtcacatccatacctctttcaaacgcgccactgactactctcataaaagcaattctatctctatgttttggatccatattcgcttgaattttaaatataaaacccgagaactcgtcatcaaacgggctaacttcaacttcttcattcgtctgacgagcattaggcataggcgcataatctacatatgcattcaagaaattctgaaccccgaaattagccaatgctgagccaaaaaatacaggagttaaatcgccatttaataatgctccattgtcaaatttttcgccagcttcttcaactaacataaattcttcaatcgcttgttcgaaagcactatcattgccaatggtgtgttcttcttcaagttcatactcatcatttaaatgtaatatgttctcttcatctctaaaaggttcaatagttttagtctcacgatcaataataccaaaaaagttttgtcccattcctattggccaattcattgggtatgtgtcaatatttaacgtttcttctatttcttctaatagttcaaatggctctttacctacacggtctaatttgttgataaaagtaaagataggaatgcctctcattttacatactttaaataattttaatgtttggggttcgatcccttttgcacaatcgataaccattactgcactgtcaaccgccattaatgttcggtatgtatcttcagaaaaatcttcgtgtcctggtgtatctagaatattaattttataatcatcataatcaaactgcatgactgaactggttacagaaataccacgttcttgttctactttcatccagtcactggttgcaaatttccctgttttttttccttttacagtacccgcttcacgaatagcaccactaaaatataataatttttcagttagcgtcgttttaccagcatccgggtgtgaaataatagcaaacgtttttcttgattctatttcttcttttaaactcattcattattctcctttaaatcctttattatccacttagataactgagaagctatacgcaatgcttcactttcttctttaaatgtaaataattgcattattaactcttcatttatttcctgttcattgagttgtgcatttaattctacagaccaaaacatatctggaatagctatcatataataagaatgatgcacgtgttcatatagatagacattgattatttcattttgttcagaaagttgcttaatgatcatagttggattttccaaactttttatacgcagcttctaaaccaattaaatcgtcacgatgtggcactttcacgtgtcctggcataatttgataaggttctctacctttagaagcaagtacaactgtatcacctggattcgcgacttcgatagcatgtttaataccttcagctcgatcttcaaattctatatagttattatgtgttgcacctttagcaagttctgcagtcaacattttaggatcgtcatctgctggattgtcaggtgtaaaaatcacatagtctgctcgacatgcaacagcccccatttcaggcgtttttgttaaatcacgttcgccagccatgcctactaaaaagatgagcttttgtttaacaaaaggttgcactgcatcaatcagtttattcataccatcagcagtatgtgcataatcaataattaaatcgattggaagtgatggatctaaaacctctagacgcccttcaacaggttctaaagatttcaccacttctacgatatctttgaaatcgattcctttactccacactgctatcatagctgccataagatttgagatattaaatttacctacatatggtgatgaaacatggtacgtgccaaatggagtagcaaaatcaaattgtgcaccttgtaaagattctttgatattttgagccataaactgtgcttcattatctataccatatgtcaatatttcataaggtgttactgtttctaaatatttagagaaatcatcatcattatttaacaccacatacttttcttttgataaatcttcacctaattgactaaatagtaatgatttagcatgtccataagcttccattgtgccatgaaagtctaaatgatcttgggttaaatttgaaaaaacagctacatcaaattctacccctcttaatcgtcctagagctaatccatgacttgagacttccatagtcattgcttcagctttactgtctacagcttgcttaattttcttagtaagcaatacagtttcaggagtagtatttgccccctttgttttttcttcattaatttgaaatccattcgtacctaaatatgcactatttttgtctaatcccctgtaaattaagtgaatcatcgtcgcgattgaagttttaccatttgtaccagtgaccccaaaggtagtgagttgttgacttggataatcaaataatgtatgcgctaatatactggctactcttaaagtatcaggtacaataacttgtgttacttctcctttaacttcttgcttacggtttacaactataattttagttccttggtcaatgacattttgacaaaatctatgactatctacggtatatcctttggaagctacaaagatactttctccactagcagttcgtgaatctgtagtaatatcagtgatatctatatctaaagttcctataacttgtttaactcttattttattgaacaactcattcgcattcaaaatgtatcgctcctttttttcaatatctctattatacacattttaaagttgttgataaatttattctcacctaaaaaagtaaattctgaactacttaaaatcaaataacttttgtatgttctgtattattaatattaattctaagttaattatttataaattttttcttatcttagtgtaagcctcctacatttcactttattagtgctaggataagggtataaagttaaagtaatcattgttcgaatatgctataattcactataaatgaattttatgacttccttgaatgaaatacatattctttatactagtatgtattttttactgtaatacatcattcgatggattaaacttaaattattggagggtgactattaatggttactcaaaataaaaagatattgattatcactggatcatttggaaacggtcatttacaagtgacacaaagtattgtcaatcaattgaatgacatgaatctacctcatatttctgttattgagcatgatttatttatggaagcacatcccatccttacgtctatttgtaaaaaatggtatatcaatagctttaaatattttagaaatatgtataaaaacttttattatagtcgaccagatgaattagataaatgtttttataaatactatggtttaaataaactgattaacctacttttaaaagaaaagcctgacttgattttaatgacttttccaacgcccgtgatgtcagtattaactgaacaatttaacatgcgtatccctattgcaacagtcatgacggattatcgtctacaaaaaaactggattactccaaattctcatagatattatgtagctactaaagatacaaaagaagacttcgtaaacgttggtgtaccggcatctttaattaaagtcacgggtatccctatttctgataaatttgaagcggatattgatcaacaggcttggctaaaaaaatatcatttagatcctaaaaaaaatactatccttatgtctgcaggtgcttttggagtatcaaaaggttttgaacatatgatagaacgtatcttagaaaaaagtcctcattctcaagtcgttatgatttgtggtagaagtaaaggacttaaacgtaatttggaagccagatttaaatcttacgacaacgttctcattttaggatatacaaaacatatgaatgaatggatggcttcaagtcaattaatgattactaaaccaggtgggattacgatatccgaaggtttgacaagaagtatcccaatgattttcttaaatcctgctccaggacaagaactagaaaatgcgtattatttccaagaaaaagggtatggtagaattgctaatactcctgaagatgcaattgatattgtctctgaattaacacatgattcgaacaaattaactctaatgataaatacaatgcgtcaggatagagtagattattcaactcatcgactttgtatcgatttattgaatatgctcaatcattcatctcaacagcaagaaatttatggaaaggtgccattatatgctaagttctttgtcaaacaataaaagcataagtaaaaattttaaaataatgctcgttattttatttttaatggaatttgctaggggaatgtatgtattaagttatgttaactatttacctactgtaacctctatcgctgtagctgtgacttcagcagcgttatctattcattttatttcagatgcagctacaaactttgtgattggttttttattaaagaaatttgggactaaaattgtccttaatttaggttttttattagcttttttaagcttgtttctaattattttctttccagctaatcctatcattatcattattagtgcaattatgctaggaattgcagtcagtccaatatgggtaatcatgttatctagtgtggaagaaagtcaacgtggcaaacaaatgggttatgtatattttgcatggttattaggtttgcttgtaggctgggcgtttatgaatgttctagtcaaaatacatccaacgcgttttgcattcacgatgtctcttgtcgtcattattgcatggatactttattattttgtagatgtaaaactcacaaattacgatactaaacctgtaaaagaacaattaggtcaaatcgtagaagtaatgaagcgtcatatgattttattcccaggtattttgttgcaaggtgcttcaatatcagctttgcttccaatattgccgacgtatgctacaaaagttgtgggggtaacaactattgaatatactgttgctatcgctattggtggtattggttgtgcaatatcaatgttatttttatctaaaataatcgataaaaatagcactggctttatgtatgccgttatttttgtaggattcatattgtttacgctatttatttttggtctctcactagttaacaatattattgttgtatggatagttgccgcctttataggtttaatgtatggcattttattacctgcttggaatacttttatggctggacatatcgatccgtctgaacaagaagaaacttggggtgtatttaatagtgtccaaggctttggttcaatgattggtcctcttttcggaggccttatcgctcaattctcaaatggattaaataatacattctatgtctcagctttcatttttctattactcgctattttttatggcatttattttatcaaaagtaaaaagcatcaaaaatattcttaaaaaaagaagtcaaaacattttagttttgacttcttttttatatacatatcatgctagtttaaaactatcaacaatgttccatctatcttcatcttcattgtaatgtaacaatgaaagttcatcgatggtttctctatggtctactcctgcaagcttcacttgaccaaatatatcttcaaattcttgactcgttaaaccttgagcaatcgtaaaatgaggaacgaatggatgttcagctttaccataaaatgattcggtattaaatgtattaaataaattttctaattcttctgttttttcaactttaaaataaataacattatttgtcggtttaaagcttgaagcttttgtcacgtggacctctacaggtttaaatccatctaatttttgtttaacttcgtctttaaatgaatctaattctgtttctttaagttcaaagtgaggtttaatcgtaatatgtggcataatacgtgcatactccgtatcataacgcttacgatagccatctacttcattttgaaatgattgtgccggaataagtgctaatcctatcttcattgaaattcctcctttgtttaacatacttctattatatcaaaattctatttaatacgttattagatacaacgtttttttgaaaaggctttcaaaaaagatatgtagactattcatatgtactatgattattatttaaaaaataatagagaatatctccgatcataggtttccatgatttccaattatgactaccattaaattcattgtagacgtaagtgacacactcatcttgttcaataaggtttgatagctttctatttggagttaaaaaatcagcttgctcaccagtcgttggtaatttaaaatcgacttcatctctaccaatcgcatgccaaattgttaatcgattacgttgcttacatgtctcaaatttttcaagaacagtatgatctgagtgcggactaaacatagctatttgactaaatattgaaggataagtcaatgaagtaagaaaggcaatacttccagctaaactatctcctattaataatctagaatttcccactttatatgtaggaaacgtttgatcaatgaaaggtaaaagttctttaactactgactgaatcgtcttttcactacgactaccttgaggatgaaactcttctctacgtttctcaacatcttcataatgaaatccaacaataatagcacgttcaatacgttcttcttttcttagacgttcatattcacgctgaatccttccaaatcggaaaaagtccaatccatcaaaacaaataatcacctgagacttaaataattcagtaaaatcttctggaagataaatcgacaatgtgatatctctttctagaattttactatttaaaatatatttattaatttttccagctttaaattcttccatattatcctctctccttcatatatattcatattgtatcaattttatttattagtgacagtgatataaacgtttataataagcttttttattttagattctatatacttttttaagagaattaggaattgtttaattaagctcatatatttttatacaattaaatattataatataattattttttagttaataaatttttcctttttaacatctcttatttaagatatacttattactaatgaattgattactttaggaggaagtaagtctatgcttaataaagtatggtttcgaactggaattttcttaatcatcctgttcgtacttataaagttatttatggaagtgcatagtgtatttacacctatagcaactattataggttcagtgtttcttccattcttattaagtggatttttattttatatctgcttaccttttcaaacacttttggaaaaatggggtttcccacgttgggcaagtattttaactatctttatcgtattaatcgctattatcgctatcgtagtagctttcattgctcctattattatttctaatgttaataatttaatcaaagcaacaccaactttacaacgtgatgcagaacaagtggttaatttctcattaaatcaaatggataaattaccaagtgatgtaacagcgaaaattaattcagcaatgaaatcaatcagtgatagtttaactggtatattagcaaattcaatcacttatatcacatctcttatttcaaccattttcttattgattatggtaccgttcttcttgatttatatgttaaaagatcatgaaaaatttattccagcaattggtaaatttttcaaaggagaacgtaaagtttttgttgttgatttacttaaagatttaaattataccttaaaatcgtatattcaaggtcaagttactgttagtttcatcttaggtgttattctttatattggttatagccttattgggttaccttatacaccattgcttgtattattcgctggtgtagcaaacttaatcccatttttaggaccttggttatcatttgcgcctgctgcaatattagggattatcgatggtccatcaacatttatttgggtctgtgttgttacattaattgcacaacaacttgaaggtaatgtcatcacacctaacgtcatgggtaaatcactaagtattcatccacttacaatcattgttgttatcttagcagcgggtgatttaggaggattcacacttattttaattgctgttccactttatgcagtattaaaaacaatagcaagaaatgtatttaagtatcgtcaacgtatcattgataaagcaaatagcgatgttaaagattaaattaattattaatgctttttaattacttattgcggatagaacatattctattcgcagttttttttatgtcatatcacattgaataatataaagctagaagagggataaaattcatttttaagtcgctgttccacatcatcaatgcctccccaatttgcgttgaatgtagatgttcttattgaaagtttctatgttctagccttggaactgaaattgaataaagcttgatacaaatgtattttcaattcagtgatcaactgtcgatttataaaaaaagtctaagacaactcattgtctcagactcttagatttatcatatatcttataactatttttcaatttaaacttatttaattgcgtggaaaccactatctacgtggatattttctccagttacaccacttgaaaaatcacttaataaataagcagcagttttacccacttcttcttgatctacattacgtcttaacggtgcacgttcttcaacttctttaagaattaaattcaatccacctacacctttagcacttaatgtacgaattggtccagcagaaattgcattgactcgaatattatctgggcctaaatcatatgctaaatatttaacatttgcttcaagacttgcttttgctacacccatcacattatagttttgaattgcaaattctccgcctaaataagttgtagctacaatactaccaccattcggcataatttttttcgcttcatgagctacaattgttaatgaatatgaactaatatcttgtgcaagtaggaatccttcacgagatgtttcagaaaaacgaccacgtaaatcttccatattagcaaatgcaattgaatgatagacgccatcaatatttccaacttcttcaccgattttcgcaaagccattaatgacatcttcatctttttgaacatctatttgataaagatgatgctctttttgatttaattgatctaataatttttctaattcttttttactacgttctttacgatatgtaaatacgagatgcgcgcctaattcgtctaatactttagctacgccaaaaccaatactacgtttgttagcgatacccataatgacaaaggttttattttctaaattaatcatataaattatctccttatattactttatattaatccgttcattataaacgtttttaacatacatattttaccattgttaataatatttaataaagtaataataaattttcaaatcatctcaataaaaagagaggtacacaaagtaatgtatctttttatgttatttttcaaagataccctttattttgtcctctcttttaaatggattaataataaaattctaattcagatttgagttcatctacatattctttagaacctgttacaattaaacggtctttatatctaagttgcgtatctccatgtggtacaatggattcattatttctaacaatacgtacaaatatgatatccccaccaaatgggaaatgacgtaatagaatattttcatatttataattcaacatttcaatttcatatagtgacgtttcaacgttacttaaaatatttagcatatttggtgtttcaattaaaccttttaagaaaattttattactaataaagttactaaatacttcaataccatctgtttttaattcttcatcatcaccactattttctagtcgacaaataactctgtttacaccatgagatttagctaattttgctatccttttatttaaaccatcatcattagcagaacacacgacaatatcttgattaaacaagccaagtctctctaataaactttcttcatattcactaatttcaatgacagtcacgttgtcaggtaaatttcgcttatcacttaaatctttacggtaaaacaacgttatattatataactgtgaagtcagattttgaacaattggaatagtcaattgatttttaccaattaacgcaatatcaatttttcggttcacttcatctggaattgggaataattttttaaatacaacaggtacaaatacacatgtaataattgcacttaatattaatatccctgacatttcagaagtaattgcttttaattcttcagcaatttttgctgcagcaataacaagcgaaagtgtagatgttaataaaaatgctgatgcaatggttgttttagtatcaaaccatcttcgaataaataagacaggaatcaacttagaaacgataaaggacaatataagtatcggaattataataagtaaagaaggttctttaattaaagatggtatatctaaatctacaccgaccataataaagaatatcggtataaagaatccgtatccaaatgaatctaaagtatgaatgatttcttcatcaggttttaacagtgatacaactacaccagctaaaaaagcacctaatatatattcagcaccaaccccctcagcaagagcaacgagtaaaatgattaatgcaaaaatggcccgtatgccaatttgtgttgtaccacccattaagcgttgcataaaatttaaccgtttaaatacagaacctaataaataaaatattgcagtaaacacgattaaaattgcagatagccaaattgaccctccgccttcaccattgattccaccataaatagttaataaaaccatcgtaaataaatctgctaatactgctactaataatataaattgtcctattgttgtacgcatgatattcatttctttaagtgttggcacgactacacccaatgaaatggttgaaataataatgaccattaataatacatcatctacaaagcctaaccatttaaatgcaaatgctaaaatgattgaaagcaccattattaacgaaaaaactgtaagtgctaattgtaaatgactgggtaaattcttttcatttttattaataccctgtctctttcttgtgtcttttttaaatgcgctaaaatcaatttccagtccacttaaaaacattaaaaagataaaacctaatgttgaaagaatgtttaacatttcatctttgtggacaagtcctaaaaatgagtttcctataataattcccattaatatttcagctacgacaacaggtaaaaaagtgacgtttaatcgattaacaataatcggtgtaagaaatgctgcgacgacgactatgaccaaagaaaaaaatcccatttcatccccctatgttagatatgacataaatgttgttgcaaggccaaaataaattaacatacttacaatatcattgatagttgtaataaatggtccgcttgcgacagcaggatcgatatgaattttattcattaagattggaatcattgagcctactaacgtacctactgtcatggcaatagttaaacttgcacctacaatcagtgccaagaagggttgacgataaataatgacaataattaagaataaaatcactgcacacacaaaaccagtgattaacccactgcctgcttcttttaaagctattttaagtttacttttttctttaatatcaccattagaaatattacgaacagacactgctaatgattgcgttcctgaatttcctgacatcccacttataatagggataaatgctgctaataatgcaacttgcgacaatgtatcttcaaaaccacccagaatcgttgctgttatcatacctaaaaatgttaaaataatcagccacggtaatctcttcaatgctttcttaaatactgattgatcagtagatttagtatcagaaacccctgctaaacgtgaataatcttcatctgcttcttcatttacgacatctaaaatatcatctattgtgataatccctactaaatgatgttgatagtcgataacaggcatggcaataaagtcataatctttcattttttgagcaacacgttcttgatcctcttctacatttacacttacaacacgttgaatcattacttcttcaacatgagcatcaatatttgctacaattaaatctttcaaagatagaacacctacgagttgaccggcagtatcaacgacataaatcacatatatcgtttctgcgtcaggtgcttgacttttaactagcatgagtgcctcttttacagatgtaccaatgtccaatgaaatatattcagtagtcatgataccgccagcagtatcttcttcataatgtaataactttttgattttatctgtgactctgttgtccatcaaagctaataaactggcaacttttgagttagataattcatttagaatatcaactgcgttatctgtagacatattttctaatacttcacttgcataatgtgcatgcattgaatcaaataatatttcatattctttcccttcaatatctaattgattaaaaaatctactcacttcttgaggcgataaaaattcgaatattctttgtctattctgattcgttgtattttcaaaatattcactttgttcatattgatgtaaagttagaaattcttttctgaattgatctatatcattgcggtttaaactgtcatctagtagtttttgattgtatactttattatgttgtatgtcagttgtttctgtatttaatgacatcaagtgtacctcctaattttaatttacactttgatatattttttctaagtttttatagtctaaaataatctcgatttctttattatatattggatgtataaattttactttataacactgtaaagattgtgtttgaatccgaggatgaaaaccatcatataagtcatccccaataagtggatgaccaatgtgcttaaaatgaactctaatttggtgtgttcgtccagtatgtaatttaacttcacataaacttgcactgtgatgactactcaacgttttatattcagtttttgcatatttaccagatggcgtaatacaccgagtaataatactatctttgtttctaccaataggtgcctctatcatagattgttctttagttttaccgtaacacacacatatatatcgcttatctatttcaaatgtcgacataaggtgatgaatatgaccatgtttagtaaagataacgatgcccgtcgtattacgatctaatcttgtaacaatatgaggtactatatattgtactttattcgtagaatgatttaaataatacatcacgcgctcaattaaactatcatgaggatgttctcttgaaggtgcacaatttaaatggaccggttttgaaacgataattaaatatgtatcttcatataatatttcaatatgtttgtttgaaggacgaagatatgtacttggaacttcttccggcagtttaacaataagatgatcatcttttttcaacatatatctaactgtcacaggttgcctattaataattaaagcgccatcacgtttaatggcgctaattgttttctttgaataattatgacgttgtaaaaatgtcttaagcatttcttcgctatgaatatggtatacaaatttcatcaatcatcttcactttcaataaacgaatcatgaactcttttccaaaaaggaaatggtctaaatctagcaaaacgtactttttcatttgcgactctaaattgaatgtcgctcacatttttatgttttagactgacatgatcaattgttgttctaattgtattatgatttacaggtgtaatcaaacatgtatgatgctttggtaatactaagggtgaaccgaccgttctaaatactctattattaatagatgcaatttcagcaatttgtatggcttcaagagaaggatgaatcagtgcaccacctagtgctttattataagccgtcgacccagaaggcgtggaaatacatagaccatctcctctaaatcgttcaaaatgtttacctctaattgcgacatctgctactaatgttgatccattttcagttttcatagttgcttcattgagtgctagatagtgtgtttcattcttagtgttgttatatttaacaataatttcaagtaatggatattcaatcacttgaaattcagaatgatgaatttcatcaatcaatttttcaacttcatgaggtaaccagtctgcgtaaaaacctaaatgaccagtatgtactccaacgaatgccacatttgataacatatgactatactgatgaaatgcttgcaaaagtgttccatctccaccgacagatatcactatttctggattttctgtatcctctatcatatgaaaagaattcatttgattcatcattttatgtttaagcgtgtttgatttagagtcacctttagataaaatcgtataacgcatgtattgacacctcatcagtcatgtttttttgaacgtttttgagtataatatttttgagcttcttgtatttcctctttaatttcagacatctcttcatctaataagtaagccgcttcagctgctctttctagacgatgttgtatctcagcaggataatctccatcatatttgtatcttaatgtatgttcgattgtagcccaaaaattcattgctaatgtgcgaatttgaatttcagctaatatcattttttgaccacttaatgtttcaattggatactcgataattacatgatatgaacgataaccactttgttttgtattgttaatataatctctttcttcgacaactttaaaatcttgacgttgtctaagcatattaacaactacatcaatatcatcaacgaattgacacatcatccttaaaccagctatgtcgtacatttcttcacgtaatcgatcaaaaggaattccccttttattcgctttatcaatgatacttgtaataggctttacacgaccagttacaaattcaatgggtgaggcgttttctccaacttcatattgcttacgtaagccttttaatttcacctttaattcatcgacagcttgtttatatggtgttaaaaattgctcccattgattcatatggttccactccgtttcactttagttcgaaagtttcttcaactgctgaaacaaactccttaccatagttattatttccttcaacattttctaggatataacttaactcatcttgaaaatgttctaattctaattcatcgttaataattacttttttatctctattattatgtaacattgaccacgtctcttgtacaaaaatcaaatatgaatacgacgagccatcatctaataaataagcaaaactaaaattatcactatctacaagcatttgtcctacttcatctaatccatcagttggatcttctgagtagcaataaatgctatcatctttgattttaatttcatttacatatatacgcatgcttgttcctccttattattccttattagtttaacataatttaactttcaaacacacatttgagtaccatagttcaagtatgctctaaacgattaaatatttagctctatatattttatttttagtattgttattactttaattttttacaaatgtccgtcataatgaactacaataatatactaaaggttttttaatgaggtgtaattatgagtactaataatgaaattgaatttaagcaattaattgatttcaatacatataacgcgattaaagcttcttattttaaacaactcacaccattcactcaaatcaattattatattgaaacacctagttttaaactacgtgatcatcgttctgctttaagaatacgtgttaaacaaaacagatttgaaatcacactaaaagtaccagctaaagttggcttgatagaatataatcatctaatcgatatgaagcctcatattggacaaacaattgtcaaatcaacattacctaatgatattcaaaacattcttactgaatttgatattggagaaaacgaattaagtgttttaggtgcattgacaactgaaagactagaagttgaatttcaaaatgaactattagtattagataaaagtcaatactttgataaaacagactatgaattagaatttgaagtcaatgattatcaaataggctttgaaaaatttcaaaatttattaaaacaatttaacttagttcacgagccgcctaaaaataaagttcaacgattttttgaatatcaagctcaattataatagatgtgagataaacttgtgaaaagtcaaattacttttaaatgtaaaaattcatgttatattagaaatatattaatagaaatgggtgatactatgactacaacaccttatgatgtaataggagaaaaagctttgtatgatatgattgattatttctactttcttgtagagaatgatcaaagaatcaaccatttatttcctggagattttaaagaaacaagtagaaagcaaaagcaatttttaacacaatttctaggaggtcctgatttatacactcaagaacatggtcacccaatgttaaaaaagagacatatggcatttagaattactacttatgaaagagatgcatggttagaaaatatgtataaagcaatcaataaagctcaatttccaacaggagttggcgaatacttgtatgaaagattgtgtttaactgctaaccatatggtgaattcctaaatataattgaaggtgagttaaacatggctgaagaacttaaaattgtagataatgcgagtcgtgaaagcactaatctgtcacctgtaaataaaatagaaatttattcattctttgatccctttaataaagattgttttaaattatccgcaattatttctaaattaagaattgagtataatcaatatattcgaatcagacatattttgaatccttcattaaaggttttgactaaatgtcaagctcaaagtacttcagattttgataatattgctttagcatataaagctgctgaattacaaggtagattaagagcggaacgttttattcatttaatgcagaacgaaattataccaaaaaacgatattatcactgaagaaatgatttgtaattgtattaaaaatgctggtttagattatgatgttttcaaagaagacttacaaaaaaataaacttaccgaaagtttaaaaatagatttgcatattgcaagagaaatggaaattgaacaagcgccttcacttgtattttttagtgaagatgtgcatgaagaaggtttgaaagtcgaaggtctttatccttaccatatttatacttatattattaatgaattaatgggatgccctatcgaaaaagaattacctccaaatctcgaaacttatattcaatccaaacaattagtaacgatggaagaactgcttactatttatgagtggccggaaaagttactcgtaaaagaattaaaaaaattagctttacaacaaaaagttgaaaaactaaattatcctgacggcgaattttggcaatctaaaatgcctaagaaataacaaagagcgatcacttatatgaagtgtatcgctctttttatattaaattgatttaataattaagcataaaaaaacgccgtgtctgattacacgacgctaaacaaaggggatgggagaaatttttcacttcaaacaaaggggtatgtttgttatgtgattaatttcatgtatataatataacacgctcaaaacgccgtttcaatattaaactacatttccatccaaaatgtcacaaattagacacattgaaaacgaatacactatttttagtgcttcattaatttttcaaatacttctaatttttgttcaaaaacttcacacgcttgctctataggttctggtgtagtcatatctacacctgcattcttaagaatctcaattgggtaattagaactaccttttttcaagaattcatttatatatctttcaacagcaggttgtccttctgttaaaatttgatgacttaaactttgagctgcactgtatccagttgcatattggtacacataataattcatatagaagtgtggaatacgagaccactctttactaatatgatcatctgtttctaccacatcaccaaagtattgtctatttaatttagcgtactcttcattcatacgagttgatgttaatggctctcccgcttcctcaatttgatgaattttatgttcaaattcagcaaacatagtttgacggaataatgttgctctgaaacgctcaagttcttggtttagtaataatagacgtcgatcatcatctaaatgtttatccatataatcacttagtagagcttcattacatgttgaagcaacttcagctacaaagatagaataatcactagagtttgatggttgatttttacgactaaagtaactatgtgcagaatgtccaaattcatgcacaagtgtatataaatcagagattgtatcagaccaatttaataaaataaatggattagttaaatgtgcgcctgaagaataaccacctgagcgttttcctttattctcataaacatctacccaacgatgatttaaaccttctttaactacatctaaatattcttttcccattggtactagcgcttttagcatccattctttagctttgtcatatggcatttcaaatttaacatctttaactaatggagtataaatgtcatacattttcaaatcatcaatacctaaaagttcttttctcaattgagtgtatttatgcaacaatggaagatatttatgaactgttgcaactaaattatcatatacttcttcaggaatatggttattacttaaagcgcgttcacgtgccgttttatagttatgcgcacgagcattgaaaatatttttcttaacttcaccagctaaagttgagcctaatgtattgttatatgcaccatacgcttcatataagttgttataagctgactgacgtaattcacgatcatctgattctaaatatttaataaatgtaccttgtgttaaaggatgtttttttccatctttatctactgcatctttaaattctaaatcagcattactaaacatgccatagacattttctggagttgataatgcatcttgcgcttgggttaataatttttctttatcagcatctaaaatatgtggacgtttttcattaattaatttcaagtcaaatgcataacgttttaaatcatcgttactcttaataaaagattctaatttctcttcatcaatttgcaaaatctctggaactaagaaactccatgctgagctaatttttatgatgagttgatgcgcacgagattcaaaaccagtatatttatcgttagatgtatcttggtcttgttttaaatgtgcataaacatacaccttttctaattgtgttccaatctcatcttctaaagctaaagcattatataaagttttagcactatctcctagatgtcctttaaattgttcttctttacctaggtaactttctacctcttttaatgctttttcaaaagcttcatcgctttcaaaaatagttgttaaatcccaagtttcatttggatattttcgttcttgctcttctctagtaagttgttgactcatacatgtacctcctaaatgaattaatgttataattttctcattattttatttattttgcacgtttaaactcccacttacttgttgaatataatcatctattaactttaaagtaatttcttctttattaatatcctgtagataaaattgtctgaatttcaaatacgacattaaataatgcttgggaaggttatgttttaacaacaacttaagcttgagttgccattgtactggatgattttcaataaaaatttgatacgaaaaaatataacctgtatctctacatacctcatcgtcagttatttgtaattgatacatagcacttaaagacggttctaacaccgaacgtttttttctacaattaaaaatataacgactgatatgtctatttgacaatttataacaatatgactcattctttttttcattgaatgataataattcagaaatttgaataattcgtctatgcgcaataaattttcggccaccaatatgttgtatattgacatactttactatcagttgtttttcatgctcccaactatataacgttctatcaatcggattaatgaaataagcttgaaacgtgttcaagtataaataacccttacgatattgtaattgatcgataagccaaataactgcaactccaatttgttcaaatcctcttgatcgagatttaacctcttttatacttattcttgaaaattgaacttctatagctactttagcatccacaagaatatcaggatactgcataattttagaaaaataaggttctatttcaacattaaagtgatattgttttaaacgttgagcaataaaaaatttaacgtagtaatgtttttctgtttcatttttcatgcatctttttttaatttgagagacatgggcaaaatgcggaatcttttttaaccctttttttaaaagaagtttttttttgcaatatggacatcggtattcttcagtaatgatggcttgatgagcatatacggtttcattattacgattaatcgctactaacatgcattcacctcatactattaaacgtttaagatgattcatttacttttaaaaaagagagtagaaaagaaatttattttaaatttcttctctactctcgattaatcgttatatattattctactgaatcagtaaaataacgacgtacttgtgaagtaacattatgactcataataattttagcgtaatcatttaaatacacttctgttttatcactaggataagcgaattcaagtaattgactgtagctatcattaattgtctcttggctaacagtactatcgaagtgaattgcatagtagtaatgtgaatcactcatatacaataaatcttcaaaatcatctgtagatagattatgatgataagcgtaatgaatgacttcttctaagtcttcgaatttcacaataattgttcttaaactagaacgttgttgtgatggtttacgtttagatttatgtgcttgtttttgttgtgcacgttgttcaaataaatcttcaatactttcttcttgttctaatgtgttagctagcaattcattcacttgttcctcaaattgctcatttgcatgatcatctgacatgttcattgcttcttcatttttagatttagagattgtgacttccacacctttttcaaatgcatgtacttgaatccaaagaggtccttcaaccacaaaatcttcttcttcattaatctcgtccatcattgaccaaaagaattcttcaccacgcttacgatttgtccataaatcttcacgactaaatcctcttgcttcaatatcaccataagtgataaataatttcacagttgtgtcgtcaacgcgttctattctcatatcatctcactccttacagtcgatgaatagtaaccatattgtattagaacgtaagttaaattacaatttatttgtttgattaaatttcactattttaaataggacactatatcatattatattccctttttttattataaaaaacagcactatagctaagccagtgctgttaaataataggtttttaaattttaaatattagtcgactaaacgttgcgcttcttgtaattggaaagtacgaacctttctaggtaagaaacgtctgatttcatcttcgttatatccaacttgcaagcgtttttcgtctaaaataattggacgacgtaatagtccaggattatcttgaataatcgtatataaatcttgtagtggtaaagaatcaatatctacgtttaatttttgataagttttagaacgagttgaaataatttcatctgttccatcttcagtcatttttaaaatttgtttaatttcatcaattgttaaatgttcagaaaaaatgttacgctccgtatacggaatatcatgttcttgtaaccatgctttcgctttacggcaagatgtgcaacttggtgatgtaaataatgttaccatacatctcactctcctattgaataaatattattcattatattaataattatactaatttgtcttaagcttatattataagtataatatgttaacattaaaattaaatgagaaaatcctaatttttctgagaaatttcaaattttctaaaaattcctatacaaaatctaatctctcatatatacctctattataacataacttacaatttaaaaaaatactgttataatctagttaaaatgaattatttttaaagaaagtaggcatctatatggagacattattttcaggaatacagccaagtgggatacctacattaggtaactatattggtgcattaaaacaatttgcagaagtacaaaacgattacaactgttacttttgtattgtagaccaacatgcgattactgtcccacaagataaaatcaaattacgtaaacaaattcgtcagttagcagcaatttatttagcttcaggtattgatccagataaatcaacattatttattcaatcagaagttccagcacatgttcaagccggttggatgttaacgactatttcaagtgttggtgagcttgaacgtatgacgcaatataaagataaagcacaaaaacgtacagatggtattccagctggtttattaacttatccacctttaatggcagctgatattgttatttataatacaaatattgtgcccgtaggtgaagaccaaaaacaacatatggaacttactagaaatttagtagaacgttttaatagtcgttataacgatatattagttaaaccagaaattcgcatgccaaaagttggtggacgtgtaatgagtttacaggacccaacaaagaaaatgagtaaaagtgatgataatcaaaaaaactttatctcattactagacgaaccaaatgttgcagcgaaaaaaattaaaagtgctgtaactgattcagatggtattatcaaatttgataaagacaataaaccaggaatttctaatttattgactatttattcaagtttaactgataaatcaattaaagatcttgaaacacagtatgagaatgaaggatatggaaagttcaaaacggatttatcagaagttgttaaagactttttagtacatttccaagaaaaatatagcgaattttataattcagataaattagatgacatcttagatcagggacgtgacaaagctcaaaaagcttcttttaaaacattgaaaaaaatggaacgtgcaatgggcttaggacgtaagagataaatcattataaaaaagaccacgagtataagtaaattactcgtggtcttattttagttatctttcttttttcctgtttcacgatcaattgatttatcgatatatacatgtttcaatgtagtatctggaccgattttatgatactgtaatcctttgacctgtggattagttaagtgtgcttcacctttttgataaacaggagctactggtgcatcatgaagcaagatactttccgcacgttgtagcgcttcatttcttttttctgtttcacgtaacaatgaactatttgattcttttaaaagcctgttatattctttgttatcccaatcagtattattttgagcattatccttagtcattgtttctaaaaatgctgttggatcaggataatctggactccaacctgaataagtcgcttcgtaattattagctaattctaaagtggttttttgtttaaacggcatttgtttaatttttaatgtaacgcctggtaagtttgattcaatttgagatttaatatactctgcagctattttagaagctggtgtatcttgcgtattcattgtaaatgcaaactcttttttacctaattctttttttgccttttcccaattttgttttgctaccttaggattatattttaaaggagactcaaccgtacttgcgaagtctttaccgtcaggcgtcttcgctgtacctattcccgtgaaattatttgaagcaagagacccatcatttaaaacagtttttacatacccttttttattgatagcttgtgcaatagctaatctcaaatttttatttttaaattcaggcactgttttttcattcattttaatataaaaagtaccagcagttaaacgatagtttaattctttactgcctttatatttatcaacttgttcagaagtgatgattgtatcatcgattgaattagtatcatataaagaagcgccagcttgttaatcttttaaaactttataatttactttatctaatttgacatttttttatcccaatattgattatttttaaccaattgtattttatcttctacctgccaattagtaactttgaatggcccattataaactgctctttcagcattcgttccatattttttatcatattttttggcaattttagcatcttgtggataaaacgtacttaaagcaagtaattcatttatgtacggtaatggtctttctaaatcaatttgaagtttatatttatttaacgctttgattcctaaagaatttaatggtttttttccagtattaactaaatctgcattttttatatcactcattatatatgcaaattcagaggcggtttttggatctacaacttttctccatgcataaacaaaatcatgcgctgttacagaatctccgtttgaccattttgcatcttttcttaaattgatagtcagagttttaccaccattacttttttgtggtgtttcttttgctacacctaaagttactttgtcatttttatctattgaatataatccttcgaaagtttgaccagcaacatcgctagaaacagcatctgtaataagagctgtatctaaagtagttatatcttgagtaattatttttctgaatacctgtccttcatcagaatataaactttttttgttactacacgctgatagtattaaagtgacaataactaatagcgttaaatatttatattttttcttcacattcttgtcctccctttctcagatttaattatgttgaagatgagtttgatcttgttcttttaaacgtactgcttcttcatctgttacaaaaacgtaatgattaggtctaatttcttgcagtctacgttctgcatttttagattcatcttcttcatacacaattcgttttcttgttctttcactatcaggatcaggttgaggaatcgcagataacagtgatttagtataatcatgtaaaggatgataataaatttcgtcagacgttcctaattctacaatttttccaaaatgcattactgctatacgatcagaaatatatttaaccattgataaatcatgggcaataaataggaaagtaatacctcgttctttttgcaatttcagcattaaattcactacttgagcttgaatagacacatccaatgcagaaataggctcatctgcaataataaactcaggctctacagctaacgcacgagcaattcctatacgttgacgttgtccaccagagaactcgtgaggataacgattcgcatgttccttacttaaacctactgtttctagcaaatcatatacacgacgtttacgatcttttttattacttgctaacttatgaatatcaataccttctgctacaatatccatgacctttagacgtgggtttaaagatgcatatggatcttgaaaaatcatttgaattttcttattgaaatttaataactcttttcttttagtaatcttctggatgtcctgtccttcgtaaagaatttcaccatctgtaatatcatttagtttaataattgcttttccagttgtagatttcccacatccagattctcctactaatcccaatgtttctcccttataaatattaaatgaaatattttctattgctctaacttcattacgtttgccttcattaaaatactgcttcaaattttttatttctaataatacttttttactcttctccattgaacgacaccctttctactcgacgtggtttgtcgtaattattaggcatttgacgttgtctctttttcaccatttccagtggttcaacttttggggcgcgttcgtctaacaaccatgatttcacataatgagtaggcgatactttaaaccatggtggtgcttccttaaagtcaatgtctagtgcatattgactacgtcttgcaaatgcatcaccttttggtggatgtaataaatcaggcggggtacctggaattgcaattaactctgtctcgttacttgtcgttaaatcaggcattgaagataataatccccatgtatatggatgttttggatcatagaagatttcatcgacatgtccagtctcaatcatttgcccaccatacataacagccactctatcagccacatttgctactacccctaagtcatgtgtaataaaaataatagatgtttcaattttttgttgtaattctttcattaaatctaaaatctgtgcttgcattgttacatcaagtgctgtcgttggttcatctgcaattaaaattttaggttcgcatgccaaggcagttgcaataacaattctttgacgttgtcccccagagaattgatggggatatgctttaaatcttttttctgcattaggcagtcctactaaatttaaaatttcaagtgcacgtttctttgcttcagatttactataatgacgatgttttattaaaggttccatgacttgcttaccaatttgcatcgtaggatttaatgacgtcatagggtcttgaaatatcatagaaatatctttaccacgaagtttgtttaattctttttcagatttaattgctaaatcttcccctaaaaaattaattgtcccttttttaattctccctgtatcaccctggaacaattttgtaattgcttttgttgttacagatttgccagaacctgattctccgacaatcgctaatgtttcccctttatttaaaaagaaatctactcctctaaccgcttgcacttccccggcagtaatatcaaaggaaacatgcaagttgttcacttctaacactctttctgacatagattttgcctcctttgttatttacgcatttttggatcaaatgcatcgcgtaatccgtcactaaataagtaaaagaataagattaataaacttaatactgtagctggaataaataattcatgtgggtgtattaacaacattgctcgtccatcatttacgagtgaaccaagtgatgttttcggtgcaggtacccctataccaataaagcttaaaaatgcttcgaagaaaattgcacttggtacagtaaacatagatgttactacaatggcacctagtgtatttggtaaaatatgtttaaaaattaatttaaattttgaagctcccaatgttcttgaagccattacaaattcttgactttttagttttaaaaattcaccacgcactactctactcatacctaaccatccggtgatagacatagctaaaataatcgtccaaatagatggttcaaatatcaatacaaataaaataacaataataagattaggaatagatgctataatttctaaaatacgttgcatcacattgtcaacacgtcccccaaaaaatcctgaaatagcgccataaacgacccctataaagatatctagtgcagcagctacaatgccaataaataatgaaatttgagcacctttccatgttctagtccaaagatcacgacctaattgatctgtaccaaaccaaaagttttctttcacgcccgcttctttataagcgctcttaccatctgctcctgttccatcaaaaggtaaaaagtgtacttgatctagtactggaattttagcaggtaaatttcgtctagtaacatcttgttcggcataatcatgtttactaaatgctggtcctacaaatgcaagaatgacaattaaaatgagtccaaccaaaccgacaatagctagtttatttcttttcaactgtgtccaagcatcttgccagaagtttttactttcacgttgtatttctggttctttatttaaatcgagttctctaataacaaaatccgtcccaaccgctccctcagaggtatgtgacatcgctgcatttgaatggtcatcaaatggtttattaaaattttcaggcattattttttacctccttgtacacggattcttggatcaattacaccataaagaatatctacgataaaaattgaaacgataaataatgtactaaataaaattgtagtagccataataactgagaaatcatttgttgtaatcgatctaacgaattggtcccctaaaccgggtacaccaaagatattttcaatagtcaaagtccctgttaaaataccggctaacattggaacaataattgtaataataggaattaatgcatttcttaatgcatgcccaaaaagaactcttatcggcgagttacctttagctcttgctaataatatgtaatcagaacttagtacctctatcatttcagctcgaatgtaacgagctactgtggccattacacttgctgataatgctaaggaaggcaacactgcagttgaaaatccttcccatcctgccactggaaaccatcttaaacgtactgcaaaaacgtattgtaatagtactgctaagacgaatgaaggtactgatactgctataactgaaataacagtagttgtatagtctacccaagtgttttgtttcgtagcagctgctacgcctaaaattaaacctaaaatcactccaataatcattgcagtaatacccatttccatagaaggaatcaatctaggtctaattaatgaccaaactggttgattatgatattggaacgaatagccaaaatccccagttactacattttttaaataatgaagatattgcactgctactggatcgtttaatccatatttttcgtttaaaattgctttttgctcagcgcttaatttagcatcattaaatggtgatccaggcatcattttcattaagaaaaatgtaattgtgatgataataaataacgataaaaccatatatcccaaacgttttaatatatatcgcgtcatcatatagtccccctttactaaatattcaaaattaacattcccttcaaaattttcagaaatatttatacacattatatatactttttacataaaattgcaatataattttacattttcttaatataagtgtaatttatatatatattatttaaaagaatatatattttagattttatttatagtaagtttacagtaaattagactatatagataagaaggttggaggtatacatgaacaatattaaaacttggtttatatggctctttttgccactcatatctacttttttactttggatgttcgtaactcaacattcctttatctcatttgttgatatcttattttatatatcacttatattatttatattgttatttttacttctccttgtacaagaaggtatatttgatgctacaagttttggttttagacgcatgcgttatcaactcgcttctcgctctaagaaaaaaactttagagaacgatgactttttcaatccaaaacaagtaaaaaaagagcattataccatttcaacatggttactacctgctctaatactatgtgcattttacttcattttgactattcttatttcaatttttctataaacgtaaaaaaaccatgcatattattgcatggttttctactcttaacttaatttttaatctttaaactttttaaatactaatactgcgttatgtccaccgaaacctagactattactcattgcatattcaatttctaaatcttgtgattcattaggaacaatatctaagtcacattctggatctggtgaatctgcatgaatcgtcggtgcaactttagagtcacgaatagataatgcagagaaaattgcttcaattcccccagtagcacctaataaatgtcctgtcatcgatttagttgaactaatttttaagtttttagctgcatctccaaatgtatttttaatcgctttaatttcatacaagtcacctactggcgtacttgtaccatgtgcatttaagtattgaatatctttagcttcaatacctgcatcatctaaagccgcttgcattgcacgagaaccaccttcgccttcaggtgctggtgcagtaatgtgataagcatctccagttgaaccatatcctacaatttcagcgtaaatttgtgcgccacgtgtttgtgctgattctaatgattcaatgactaagataccagcgccttcacccatgataaatccatcacgtccttcttggaaaggacgacaagctgtttctttatcatcgtttgttgataatgcacgacttgcactgaatcctgcaagtgccatatgcgtaataggtgcttcagtacccccagtaatcatagcatcagcagcacctctttgaatgattttaaatgcttcaccgatagaatttgtacctgtggcgcaagcagtaacagttgaaccattaggtccttttgcacctaaatcaattgaaacttggccagtagccatgtcaggaataagcattggaacaaagaaaggactaactcttcttggtcccttattcttcagtattgtatgtgcaacttcaaatgtttccattccaccaatacctgaaccaatccatacaccgatacgattagcattatcgtcattgatagttaaattagcatcttctacagcttgtcttgccgctactactgcatattgtgtaaaacgatccatgcgacgcgcatcttttttcgaaatatgatcttcaatattaaagtcttttaattcacctgctaagtgaacgttatattcttcagtatcaacgcgtgtaattgtatcaattccattgacaccttttaaggcattttcccaatttgtttgggcatcgtttccaataggtgataatgcacccatgcctgtaattaccactcttttgttttcagtcatacattaaatcctcctatttaccccatttgattaccatagcgccccatgttaggccgccaccgaaacctacgagtactaaagtgtcatcatctttaattcttccattttctaactcttgttgaatacttaaaggaatcgaagcagctgacgtgtttccaaaacggttaactgaaacactcattttttctctttcaatacccaatctttcacgtgctgattccataattctgatatttgcttgatgtggtataaacatatcaatattatcagattctaaaccagctttttcaactacacgtgtagacgcttcgcccataattcttacagcgaatttaaaaacttcgcgtccattcattactagtttaccagtctctttatttaaatataagtattttccacctgacccatctgagcccatttcatagctaataatacctcgtccttctgagacttcaccaattactactgcacctgcaccgtctccaaataatacagcggttgaacgatcagttaagtcagtgattttggataatttatccgcacccactactagaatatttttatagtctccagattgaacatattgttttgcagtaatcattgaatacatgaaacctgagcatgcagcaagttgatccatagtaggcactttaccagtacctaatttttcttgtagtatattagctacagatggaaatggcatatctccagttgctgtagctacaataatcatatctatatcatttggtttaataccagcatcttcaattgctttcttacttgcttcatatgctaagtctgacgtatcttgatcgtcacgagaccaacgtctttctttaataccagtcatttttgaaatccattcatcagacgtatctaaaaaaccttcaaaataggcgttatcgactactctctcaggcgcataagcaccaaaaccttttatacctacgttcatgaacgtacaccttctcacttcattttttaataccaggtattaatttaacatactttttaaatctaactcaagtagttaaactttattaaacgattttgttaaacagtcacgagtcaataactcatataaaaattggtacaaatttttatacattctctactaatactatacaaataattcactttactttaaaatgataatatatataaattggaggtcttatatatgaaatacctcgtaacttttatttgggcgttaatcttaacacaaatggttaactttgtacttaatagtttaaatggtggcggcagtctagatgtgattaaaccaattattattgctatcatcattaccattgctattgccattttaagtgctatgattaaacctaatgatttcgctcgtaaagggaatagagacgtctaaatggtattgcattacgtgtttggagtaatataacgctcttaacaagtttaataataagaaaaggcattggaaagctttgctttccaatgcctttttatatactattcagctaaaggtttttgtacatcaaatgttaattcttgactatcgttaagatcaacatttacttttgtaccttctggcatattttctttaatcatcatacgagcgagtggtgtttcaatttgacgttgtacaaaacgtttaagtggtctagcaccaaattgtggttcgtatgcttcttcacctaaccattttttagcttcgtctgatacttcaattgaaatacgttgatccattaatcgaatatttaattgagttaaaattttatctacaatcatactcatatcatttatagataatggtttaaataatacaatatcatccatacggtttaagatttctggtttaaagaatgcatgtaaactatccataactgctttttcagtgctttcagtaatttcaccagaatctttaacattttctaataatatttgtgaaccgatattacttgtcatgataataattgtatttttgaaatctacgctacgacctttagaatcagttaaacgcccttcatctaaaatttgaagtaacacgttgaatacatcactatgcgctttttcaacttcgtcgagtagaataactgaatatgggttacgtcttaccgcttcagttaattgaccaccttcatcatggcctacataaccaggaggcgcaccaattaatctagaaacagaatgtttttccatatattcactcatgtcaatacgaatcatatgtttttcagaatcgaatagtgatgaagcgagtgatttagctaattctgttttacctacaccagttggacctaagaataagaaactacctattggacgattaggatcttttatacctgcacgtgctctcactacagcatctgacacaagatctaccgctttatcttgccctacgacacgttcatgtaagatatcacttaagtttaataatttttctctttctgtttcgactaatttagaaactggaatacctgtccattggcttacaatatctccaatttcctcatcagaaacaacttcgcgaatcatgcgttcattatcgccttgttcatcatggaaagcttcttcgtattcttttaattctttttctaattgtggaatcgtaccatattgtaattctgccgctttttcataattactttctgtttgcgcatcttctaaagcttgacgactacgatctaattcagcacgtttttcttgaactttcgcgattttttctttttcttgttctacacgagattgtaatgacgtttgtttttctttttcatttgaaagttcttcttgtaattcttctaatcgatgtttacttgcattatctgattcatttttcaatgcactttcttcaatttctaattgcataacacggcgattaacttggtctaattcagttggatttgatcccatttctgttcgaatagtggcacatgcttggtcgactaaatcaattgctttatctggtaagaatcgatcagtaatataacgatctgataattctgctgctgctactaaagcacggtcttgaatacgcacaccatgataaacttcatagcgttcttttaaaccacgtaagattgaaattgtatcttctacgtcaggttcacttacacctactttttggaatcgacgttctaaggctgaatctttttcaatatattctcgatactcattcaatgttgtagcaccaatacaatgcaattcaccacgagctaacattggttttaacatattaccagcatccattgcaccatctgttttaccagcaccaactaacatgtgaatttcatcaataaataggataatacgtccatctgattctttcacttctttaagtactgctttaagacgttcttcaaattcacctctaaattttgcacctgcaactaatgcacttaaatctaattcgaaaatagttttatctagcaatgattctggcacatctttacgcacaatacgttgtgctaatccttctacaattgcagttttacctacaccaggctctccaattaatactgggttatttttagttttacggcttaaaattcgaatggtattacggatttcttcatctctaccaataactggatccattttgccttggcgaacttcttctactaaatctctaccatatttctctaaagcttcataatttacttctggattttgtgaagtcacatgatttccccctctaactttagtaataatttctttgactacttcttctttatttcctacaaattgttgtgttgtttcatcaatatccatagcagcacgtaaaatatgttccattgagatataatcatcttcatattctttcatatatgactcagctttatttaataattcgtttgcttttgagccaatatattgtccatattgcacattatctccttgtactgatggatagtgtttcaatttttcactatacgcttggtttaattgatcagtgtctatatttgcacgttctaaaatacttttaaacaagctttcgtcttcttctaaagttccttttagtattgcttcaatttcaatattttgtaattcattttctttacttaattcaattgctttttgcaaagcttcttgtactttataagtcatttgattgatatccaaatttattcacccctactttttgtataagagtatggtcaaatacttctttatttgactttgactttgactttctttgaccttaattacattatagaccttctttgctaattaatcaacacttttactcatctttttaacaattcaataaatcctatcatatcaagcatttatttacgtttcactcattatttatcatatcaccttactatttaaacattgttaccttaattttttcataaatgttaaaaaaggattaactttgtgagcatcctcaactagttaatcctttttaattatttattttttagtcatattttttagtatttcgtccgacaatgcttgtaccccactatgttctaagtgcaccccatcagatgcaaaatattcagtatgaccggcagaacgtttataccagtctactaaaacaacatttttatgtcgtttagctgcgtctgaaagttgtttatttacattatcttgccagcttctcggtacccttgtattaactaaatatattttggctttaccaaatttactaataagttggtcaagctcatcttgagtaaaatctccatttgtaccaagttctaatacaacttgatttgatggtttattataattagtataattatttgcaactatcaaagcttcttgcaaatggcgacctactttaccatctatagttgctttaggaacttgagacttaaattcttcaccaatatctaccataactgaatcgccaataagtaatgggctgatattggtgtaaactttatctttattctcactcttacttgtttgtccatttaacttaatattttcaccgggcatcattttaactaaatatttatcagcagtacttgtattaaaactgtttgctttatttgcaatttcatcttttccaaatcgatcaaatgcacccataaatattaatagcaatggaatcacagctatgatagtaactattgttcttataaatttaggtctacgtaatcggtcaaaagaaaatgcgcttaacccttcacgtctaaatggtgtttcaatataacgataagataattccgcaaacgccacagttaatagtatatctaagatatatacatatattggtaactgaccatcaacaaaatgtatatgtagaaaactaatgacggcgaaatgccataagtataaactatatgaacgttttccgatatacactaacaaaggatgtcctagaaatttagcaatcattgtagacgggtgaacgacacttgcaataacaaataatgtcactaaagatatcaaataaaacccgccattgtatatccaatcattatcgtcgttaacagtaaagaataaaataattaagataagtaggctacctataccaattccatctattgcacgacgtaatcgttgtggtggattaacttttaatttaaatggtggccaaacaaacgccaatatgacgcctaataataatgtttgtaaacgagtatctgtaccaaaataaacacgagaatatcccacatttggttgtgatataatgaccatttctaataaagaggccaatgatactatccaaaatataagtgtcacattacgatattttttaatcgtaagtaataatatcactaaaatgaatgggaaaaataaataaaattgttcttcgatagcaagagaccataaatgtttaagaggcatgaatgaaaattgttcaaaatagttaacatctttagcaatataccaccaatttgaaacataaaatagcgctgcaataatatcatgtttaactctaataatttgttgaggttcaaataataaggttgcaatacctactgttattaataaagctatcaccgctggcaatagacgttttatgcgtctaatccaaaattgtttaagattaataattcctttttcttcatactctctcaaaagtaaacttgtaattaaatatcctgaaataacgaagaaagtatctacaccaataaaacctccagttagccactttctattcaaatgatatataatgatgcctaatacggcaattgctcttagaccatctaaaccaggcatatagcgcatttttgttttatcatgcacgcccttttctaaattttgtttcattgttcacattctttccctattaaataataaattttcaataaattcattagatataaaagcactaaaatcagaataacaataaagttaattatagaagtttatatgtatgattggtcattctatagtctatgaatttaatacactgtataatatgattctgtgttttatactaagttgactgaaaacttgatatacaattaaataaaatataaattcattttcattgattaattcttaattgttgaaaattatactttttctaagatataagtcttatgtattgtagtataacctagaagtaaattcaatttatattacaattgtgtcatttcttttttactcatttaaaaataaaattgtcacattcttatatattaaaaaagagagtagaagaaaaattcatcccctactctctattaaatattgtatctagcgcttcataataaatagcttcatacattaatgctatcgagctcgcttaaatttatccaacgcctaatgcgatttttgcatatctagacatcatatctttattccatggcggattccaaacaatattaacttctgtatcttgaatctctggaatttcggctaatactgtcttaatttgatcgatgatttgtggtccaagtggacagcccatagatgtaagtgtcatttctacagtacataatccttcatcatcaacgtttactttatatactaaacctaaattaacaatgtctatacctaattcagggtcaattaccatttccaaagcgccaaggatactatcttttaatgcttcttccattagtatcacctctccataattatctttacactaatatatcaaatatccgacaaaacgccaataaaatgctatgatacaaataaactaatatttatgaaccgtaatgcaaggagatatttatgaaaccttatttaatttgtttagatttagatggaacattattaaatgataataaagaaattagtgattatacaaaaaaagttttaacttctttacaaaaacaaggtcattacttaatgattgcaactggacgtccttatcgtgcaagccaaatatattatcatgaacttaatatgaatacacctattgttaattttaatggtgcctacgttcatcatccaaaagcagatgactttgaaaccaaacatgaggtattagatgtagatatcgctagaagtattatagaggcacttcaaaaagctaatgttacaaatattattgctgaagttagagacagtgtctttatcaataatcatgatcctcgattatttgaaggtttttcaatgggtaatcctaaaattcaaacaggcaatttattagaaaaacttgatgaatctccaacttccatattagtggaagctgaagaagtgaatatcacacgtattaaacaaatgttaactcgtttttatgctgaaaatattgaacatcgtcgttggggtgcaccctttcctgttattgaaatcgtaaaacgaggtattagtaaagctcgtggcattgactatgttaaatcatatttaaatatagattcttctaatattattgcatttggagatgaagataatgatttagaaatgattaaatatgctcaatacggaattgctatggacaatggtttagatgatttaaaacatatcgctaatcatattacttattctaataacgaagatggaattgggcgttacctaaatgaatttttcaaactagaaataccttatcaataataaaaatgagagtacttaaagtaagattctaaagattataattgtatctcacttgtttacttcttagttatggaggatatgtatgactaaaattattatagttggtgctgttgctgggggcgcaacatgtgcaagtcaaattcgtcgcttagataaagaaagtgacattatcatttttgaaaaagatcgagatatgagtttttctaattgtggtttaccttactatattggacatctcgtttctgatcgtcatcaaatattgcctattacaccagacgtttttaaagagaagaaaaatattgtagttaaaacacatcatgaagtaattggagtcaacgatcaacaacatgttgtacgtgtattgaatcatcaaacaggcgaaacattcgatgaaacttatgacaaattaattttaagtcctggtgctagtgcgaatactcttggatttaccaatgactttactttcactctaagaaatgcagaagatatggaccaaattgatcaatatattactcgtcataaagctaaacgagcattagttgtcggtgctggttacatttcattagaagtattagaaaatctttatcaacgtggtcttgatgtgacatggattcatcgttcagataaagtcaataaattaatggaccaagatatgaatgtagccatttttagcgaaattgatcaaagaaacatttcatatagattaaatgaagaaattgaatcaattcaagcgcatactgtttattttaaatctggtatacgtgaagattttgatattattattgaaggaataggaactcatcctaattcatcatttttacgttcatcaaatattcatatagataaaaaagggtttattcctgttgatgattgctttaaaacaaatatacctgatatttatgctctaggtgatgtcatcacctcacattatcgccatgtaaatatgaatgctcaagtacctttagcttggggcgctcatcgtgcagcaaatattatagcagaacaactctcaggtaataaaaatattacatttaaaggttttcttggttcaaatattgtaaaattttttgactatacttttgcgagcgtaggaataaaacctgaagaattaagtctatttaattatgagatggttgagattaagtctggtgcacacgcagaatattacccaggtaatacacccctacacttacgtgtctattttaataaagacaatagacgattattacgcgccgcagcagttggaaaacaaggcgccgataaacgcattgatattttatcaatggctatgatgaatcaacttacagtagatgaattggttgaatttgaagttgcctatgcgcctccttatagtcatcctaaagatttaatcaatatgattggttacaaagcacgcaatatataaaaaagaatcgtttgagtagacactcaaacgattctttttacttaacttaaaccgaacattttagataatgggccccatggtaagataattccaagagccatagtaataataattaaaataattgttgcccaaaataagccatgactaggtgcatgtttttttcttttagctaatgatacttccattaaagcaacaacacctaagccacataacatttttaaagtaagaagcatgtggttgccaccctcaccatgactcgctgccataaactcttcaattaattcccagaatcctgagaataatgtaaggagcataaagactctaagccccatatgtaatgatttaaaagttggtgttggtccttgtgattttgaaatgtgtaaaaatgcaataatgtataacacaatggttaaaacccaacttacaatatgcatatgtaacaaaacttgattccctccaatatttataatcattttctttcaattatcataacacattttcactttttaagtattaaaattaaaaaagaagagaagccttagcttctctcgctttaaacataactagcattattgtttggcaatataagttgtcaaagtaccaatgttatcaatagtgactttaacttcatcacctggttgtaagaattttggtggttgtaatccagctcctacacccgctggggtaccggttgcaatgatatcgcctggatgtaaagcaacatatttagaaatttcttgaattaagtcatcaattttattaatcatttgactagtatttccatcttggcgaatttcattatttactttagtgacaatattaacattttctggagtaggtaattcatctttagtaacaatatatggtcccattgggcaaccacctgttaaacttttagataagaatgcttgatcttgtgcattttgagcagtgcggtctgtaatatcgttaataatggtatagccataaacataatctagtgctaagcctttaggaatcttttcgccatgtttaccgataacaatacctaattcaccttcgtaatctaactgatctgtaatatctttatgatttggaattgttgcgttatcaccagttaaagaagaagctgctttagtgaacacatataaacgttgcacttcatgatttaactcagaagcatgatctttatagttacggccaaaagcaataacattgttcggtggtgttacaggaggtaaaaattcaatatcattaaatgagaatttatactgatctgcttttccactattttcaacagctactactgctttacgtacttgttcttggaaatcgagtgtttgattttgttgtaaaccttcaagtaacgtttgtggatggaagtctccttcaccaaattcagcaaaaatttgttttaaatcccatacagcgtcttcacgctttactttaacgccatatgattcagcgttattgtatttgaatgataaaaatttcattcattatcaactcctcatctatatcttatttcatattataactttaattattaataaataacaaatatatatgtctgaaattttagaaatttggcgcatcttttctaaaataaaataagattgatattataaaccatcttcaatgctcatttcaccgaattggaagaaatataaatagccgtgcactcttttatttagtattgtttctaaggtgtttttgtaatatttcatttgaattttatacttatcacgtaattgtattccaatttcttgatccgtcatccctcttcttcgattaaaagcgtctgttttgtaatctacaaaataatattggttatctttaataaaaatcaaatcaatcataccttggataatggagacatcttcatctaaatctggtatttcatctacacgtgcttggttaactacaaatggtaactctctgtatacttcatcagcttgtgcaattttcatatataagtcactacgaataaattccataattctttcaaattggatatcttttttagcgtcttcttcaataatgtgttgatcaattaacatatgaatatagtcatctaactctgtttcagttaatcgttgttctctaaatggaagatgctgcataacggtatgcatcaatgtaccaatttcattagctttacgttttctttcttgtcttaagaatttaggacgttcataagtataagcaccaatgcgatattgtcttactctatcgtaacttgttccatcttctttagtttctaattgacgttttaattcagatacagattgttttgatggcttttgagtattttttataaatggatacttaaacgttaattgatgaatcatttgttgttcgttttctttattattcggagcctcttcttcaatatcattgatagttcgatgtaatgtctcatttgaatcgcttattaaagataattcatcgaaatgaataattttcaaatctacatatggtttcaaactgtcatctaattgattgatagatgtctcaaattgataatcagatgtgatagattgagataagtgtttcgctaaaatactatataccagattaaaaggtcgttctactgataatcttttatgaagtgcaatgagttgatttgaaataggcaaacgttcatactttcttaacttttcttctttatctaccgttccgattagaatgagctgttcttttgcacgagttaatgccacatacattaaacgcatctcttcagaaatcaattctttttctgttaatgatttaacaactacagatgaaagtgatggataagaaatattgtctgttaaatcatagtactccattcctaaaccatatttttgatttaatactaaaggtttccgaatatcttctttattaaaattcttagaaagaccagaataaataacatatggaaactctaaacctttactactatgaattgtcatcattcgaactacattatcattaggtcctatcacattttcttcaccaaaatcttttttacgctctatcaattcatcgataaatcttataaattgataaagtcctctaaacgtagaattttcaaattctattgctttattaaacaatccaaaaagattagcgcgtctgcctttaccaccaatcagtccactaaaatattgaatgacataatgatcattatagaacttatcaattaactgatacacaggatgtgtttgcccataatcttgatataaatgtatatcttcaataaaacgacgtaatttattaactaattgtgcgttagcttgatcatattttatatagtgtaaaattgattgataaaagtaatcatcgtttgaactgactactcgaatttcagcaagttcatcttcagtaaattgataaataacagagcgcattaacccaactagataaatatcttgcaatgggttatcaatcgttctaagaaacgatagtactagtcgtacttccgtttgttcaaaataaccttccttactattaacatggaacggaatattattatctttaaatactttttgcaaacgtctagcattactcattccacgttctaaaataacaatatctttataagttgctttacgataggcattgtttttcgcatcgtaaacgagtttattgtcaaggatatgttttacttgttcaactacataatatgcttcttgttcctgtctatctaaatctatgtcctcattttcagatttaataagtgcatgtaattcgagtggcattgctttttctggataataatgagctccgaaatataaacgtgcatcggcatcataattaatttctccaaccgattcatccatcatatgatcaaaaagataattagtcgttgaaagtacttcctttcttgagcggaagttattagataagtcaattcgaagtcctgtttgttgcccttctttagtgaatcgatgatatttactcataaacaatgtaggatccgcttgtctaaacttataaatagattgctttacatctcccaccataaataagttgccatctaattcatcaccacgtttgatagtagatataattgcctcttgtacctgattggtatcttgatattcatcaataagtatttcttcaaattgatgacgatactctttagcgatagtagaaggcgtcccgttttcatctgttaatatttgtaaggcaaaatgttcataatctgcaaaatctagtacatttctactacgttttttcttagcaaaatcattaatgatatctttaatgatttgaactaaatattttatccgaggcgctaactgtttcatatcgtctttaagttcatctactgaacgcattaaatatttattttttacattttgaatggtttcattatattctttatagaaagatttaatatcttcaagtgtctctaaatcttcattttctttttttatttttgatgacatttgtggaaacttttcaggtgtatgattaagaagtgcatctctattcaaaacaccatcttctaatattctttggcatatcattttctctctttggacaacttctaaatgtttttcaacagcattacaatgggataaaagattttctgcttcaagaagtgagtcaaatgctgctttcatatatatttctgctagtatttttaattctttaaggtagtcttgttgcttctcatcattctcgtaaggatcgactaatgaatctaaccatttaaatggtgaaggattagctatactaaaataataaaatcgttttaaaatttctctaaatctatcgtcatttctatcatttgatagttgttcgactaaagtcaaaaattcaatatcaggatcttcataatgatgttctagtacttcatcaattgattgctctaataaaagtacattttcaacttcactaatcgttctaaaattagggtctagttggataacatcataatgttgttgaatcacttttaaacaaaaactatgcagtgtagaaatttgagcttgatgtatttttatacgttgactttttaagtgttcattcttaggatcctctaatgaagcttgttgaatacgttgttctacacgatgtttcatctctctagcacttaagttcgtaaatgtcactacaagtaatttatcaacatctacttcatcttttaagattttttgaataatacgttcaactagaacagctgtttttcctgagccagcagctgctgcaactagtatatcttgcccttttgcatatatactgttccattgtgcatccgtccattgtgcatctttaggttttactggaatattattcattgtcctcaccgctttctaattcgacctcttgaattgcttgaattggattaatcgattcatctacatggcgataatgtttactatcaataagactatctacgtgacatactgactggaaactacaaaattcacatggtaatttgtcttcaaatttaagtggagctacttctgtgtgaccatccataatatttgaagcagtctcaataaaattatttttattgtgttgaataaatttatgaatcgttgtttcatcagcaacttggcttccccgtgcactaatacctccatctttttttaatgtcacgggtacaatatctgatttagatatctcgttaagtcttatatccatagcatctataacttcagcatcactattgattaatccttttaatttatattcttttagaatagcttgattaatattttccttattcaatgcctcttcagttaaatcgccccatttttcaaatttcaaacgttcatcatgaatgtggaaatataacaatccacctggtttaacctctgaacttaaaccaagccgctctgaattttgtaatacgatatccatatacgtcatcatttgcatctgtttaccataataaacttttttcaaatttaaattggcgctatgattagatgatttataatctataatatttacaaaacttgtattattttttgtataagcatcgatacgatcaatttgtccacgaatatgaatcggtatcccttgtgtcgtcattaagggatgtgcaatcaactcttcttccgttcttggtttctttctaaaagcagtttcaaaacgttttggtctaaattttgtattctcattttgataacgaagtgcctttaacgtactttcaacaatgacacctatacgtttagatacataacgataatatgcattggaatccattaaattaaattgcacttgtggtaagacatgttgtagagcttcttcagtaagtgcatggattttctgattatccaattgactaaattctccatttactttatccgaaatatattttaaagcattatgaaaaatattacctaaatcaaaactttcaagttgatatttggtacgttcatttagacgaaggccgtaagtagcataatgttggaatgggcaatcattataaccttcaaatcgtgaaacactagcattaatagacgttccatataatgcttctgacaattgtggtgtgagttgaatggtttcattatcatatgttaaagctgttgataaatagtttatactgtcatttaattcttcattttcacttataactttataagcatcaagccacgtatctgctaccgcttcttcttccaaccacgatttcaatgcttcaaataaatgaattttagtttgatgtggatgttccattaatgtaagaggataagcatgatgaagataatgaatatttttgatatccaaattactgaacagtgcttgaatctgatttaaaaatggacttttctctttttcatctccttgcatccccataagactatatgaaaaagtcatttgttcacatgcacgtgtcatagcaatgtagcatacaaatgcttcatccatttgtaagatatcagaggttggacttaattcaacacttccccgttcctctaacaaacgtttttcttcatcagtgattaagcttgaagatgacaagggctgtggcatcactccatcattcatcccaaccatataaacgtgttttttattatcaacttttgctaaatccatagtccctatgctaacttgatccaatgtttgaggaatcattacaaattcaagttgctcaagtccaatgtcaaatacttctaagaatcgatttaaactcatttcttcttcttcaaatactgtgactaaatcatctaatatttgtattaatccattccataattggtcaatttcttctgctttctcatggtctccttttaagtctagttcatcacggtgggccattaaatatttaggcaaatcaaaagcttccattgtttcataaaatgcagttgcataatctctaacatttttagagtgaagcatggctttctcaaaacgaagtattttatttacaacatcatcctttaagcgtacgacgtcttcaaatgcttctttttcttcttcagttaattgatgcgctttacgtcccatttttgtaaaattatcgatattaaacaatttatcatctaaccattttttaccgtaaatacctcgttcaatgacaaagttttctaatagatcaattaagtaactactatttttaaattgattagataaaatattggttttaaatagtctcatcattggactaagtcccatattactttggataacttctaataaagaacgtatcatttccattataggatgatgtgtcatcgattttttagtatcaatattataaggaatatcatattgtggcaaaatagattcaaatagataggcatatgtttcatctctatataaaattgcaatatcttgatatctaaagtgtttatcacgtgtatctttaataatacgtcgtgctatttcattaacttcttctctcatattcgatgactcaagtaaatcaatataaccatgggattgagttggattaacttgaagtgcgtcaaattgttgttctaattgtaataaatccttatttttgaaacgatatggtgttgtaaaataatgttcatttaaaggtatatgtaattcatttgcaatttcttttaagtgaataagtacgtcagaaggttttctaaacatactaaagtgatcttcattaccatctgtagttaataatatagtaacttgtttagcattttgtactaatgctttaataatttgatattcaagcgttgaaaagttataaaatccatctatataaatatcagcatgcttaatccactcagatttgtgcattatttcaataaaataattaagactgtcttcagcggtaataaattctccatttaatcgttcttcaaaataatgataaataagcgaaatatcttctagtttatgtcgggttcttgtttgtaattcattatcttctaaaaataagtcaagttgatgaggtgttacagaatatttcttaaaatcttggatttgttcacttaatttttcactaaaaccataataatctgcttgagattgatataatttcatttctgatttgtgttgttgaacgatattgaatatcatcatttcaatagctgctttagttaaacgtgtttcagttaatcctccgagttcttgaaagattctatagctcaaacgctcaaaatgtaaaacttccgttcttaaactcccatttaactctcgatcatttacgaaagattgctccaattgaaacgtactttgggtaggtgcaattaaaatgataggatctccaagaggattttctttcatttgttgtttaatatttttaatcatatgatacgatttaccggtaccagctcttccaagatatgtatttaattccattatctacacgctcctttaaactcattttaccacggaacatacgttcttaaaaagtaaagtagataaaataaaagtagaatgcgaattcgcctgaattgacattctacttttattttaaattgatatcctacttatctggattaaaattaaatttaaaattatttaatggccaaaatctaaatgatactttaccgacgatttgttgtttatctattaatccaaacgctctactatctttactaacttcacggttatctcctaatactaagtatttatttttaggaataacgttagagttaggatgagcattaagaagatccttagtttcaaaagatccagtaatgtactctccttgtttatgtttttcattatagtctaagtaaggctcatttacctttttcccattaatatatagctgatcttttttatatgtcacactatctcctggtacgcctattactcttttaacatagtcatcagattgattagcatggaagacaataacatttcctttttttatgtttcctaccttataacctaaaatgttaaccatcacatgttgcccatcttttaatgttggatccattgagtcaccttttattgtataggatttggcaacaaaagtgactacaagccatacgagcaataaacctacagctatcgcaacaatccattctgttatttcttttttcaaatataacacctcatctatttattaaactcatagttgaatgatctaaaaggataatatcttagacatacatttcctataacatcactttttttaattaatccatatcttctcgaatcagttaatgtattactatgatcattcaacactaaaaatgagtcaggtggaataatatccccatcagtattttctaaatctcgtaatgcgaaatcattaatatctctatttttagcataatatttattcacttgtctatcatctttatataatttaccatgccttatttctatcgattcgcctgctttcccaataatacggctaaaatgaatttgattatgatgccgatacataataatatccccttcatttaataaattaaatgtcactttcaatttattaatcattatataatcatttttatttagagtgggggccatttcattagtatgaacaattgcgcttcttagtaaaaaaatttgaataaacatcacgaaaataattgctaaaataatggatatacttgtacttataattcgacgcaaaatgtcactcctcatgtgttcccataaaatgtttttcaactctttttccaataaaccatatgactatagtaacaataattaaaataattgctcttataggatgagttaaaaatgtagtcacttctctacccatcaccgctaaaaatgatatggaaataagctttgaaaataataaaataataaaataattcttcattttaatatgagaaaaactagctacaaagttcactactgtattaggtgtaaatggaaaacacattaatataaaaataggaacaagtccttgtttatctataaaatgtgtgagttttttcacacctttttttgctttaactctttgcataaaagatgtatcaacgaatttcctacaaaaataaaatacagtaaatgttccagcgacgatccctaaccaactaataatagttcctgtaataaaaccataaatatgaacatttaagatgacatagagagttaaaggaaaaacaggaattatagctcttaaatagagaataataaaacctgcaatgtatcctaattgttgtaacacattaaaccaatgttcaatttgatgaaacactatatcatcaaatcctttcttgaaatttcatcattctctattgagtataaaattattttacactcttttcttaaaaaaactattaattcactaagaaatcagtcacaagtactagataacagatttaacattagtcatattaatcttttaaaaaagaatgagactgaattcacaacgaattcaatccttttctcttgaccccatcttacgttaaacaaaaacttctttttatgaaagtctatatgctaaaaaagattgatataagtatatattcaattgagtcattgactgccaatatattaaaaatgcctaagacagctcatcgtgtcctaggctttaaatgattattttatttaaatttatgttgatattataaacgttcttctaattcttttttcttatcctcataacctggtttaccaagtaaagcaaacatattttgtttataagcttctacgccaggttggttaaatggattaacacctaattgatagccactcatcgcacaagctaattcaaagaagtaaacgacataaccgaatgtttcttcatctaaacgtgggatattcacaacgatattaggaacgccaccatcagtatgagctaataatgtaccttcaaatgcttttgtattaacttcatcgattgtttttccagctaaataatttaagccatctaaatcgtcatcatctttttcaattgtaatatcatgtttaggttgatttacttttacaacagtttcaaataagaaacggcgtccttcttgaacatactgacctaatgaatgtaaatcagtagtatagtttgcgcttgaaggataaatacctttaaagtctttaccttcagattcaccgtataactgtttccaccattcattaaagtactgcatagatggttcgtagttaattaacatctcagttgtataacctttattataaagaacatttcgaattgttgcatattgatatgcaatattctcttctaaattttcagatgatagttctttacgagctttatttgctccattcataattgcttcaatatcaatacctgcagttgcaattggtaataatcctaccgcagttaatactgaataacgaccacctacatcatcaggtacaacaaatgtttcataactttcattatctgctaattgtttcaatgcaccttttgctttatcagttgtagcaaagatacgtttttttgcttcatctttaccatatttttcttcaactaattgtttaaacaatctaaatgctacagcaggctcagtcgttgttcctgatttagaaatcacatttactgaaaagtctttatcagacaagtaattcactaattcttgtgtataacttgaagataagtgatttcctacaaatacaatttcaggatattctgtattgttacggaaagatgaagtaagcatttcaattgcagcacgtgcacctaaatatgaaccgccaattccgataactaccaatacatctgaattcgattgaatatgtttcgctgctttttgaattctagaaaactcttctttatcataatcttcaggtaaatttatccaacctaaaaagtcgcttccagcacccgtaccttcatgaatcgttttatgaattgtttttacaatatctttttgttgatcaagttcatgttgaccaaaaaattctaacgttttgccataatctaattgaatatgagtcatttatagatcctccaatgtttatgaattagtttcattttactaactttaagttatctattcaatgaacaagttcaattattcaaaaaatagtctgttttttttttagaatcattgaattactttactttgtaatgaatacacaattgaaatagcaatcaactctttagttgtagtaatattcaatgaatatagaaataacaatagatgattaatactattccaattatctttattttgcataaatatgtaaaaaaatggttttattttcaaaaacaatctgttagtatagaattatattaattttcagaaaaattttgaggtgacaatatgaaagataaaattgttttagcttattcaggtggattagatactagtgtagctgttaaatggcttatagataaagggtacgacgtagtagcagtatgtttagatgttggcgaaggtaaagatttagatgttgtttattctaaagcattagacatgggcgccgtcgaatgtcatattattgatgcaactaaggaatttagtgaagattacgtaagttatgcaataaaaggaaatttaatgtatgaaaacagttatcctttagtatctgcgctttcaagaccgttaatagcgaagaaattagtagaaattgctgaacaaacaaagtcaatcggtattgcacatggttgtactggtaaaggtaatgatcaagtacgttttgaagtagcaattaaagcacttaaccctaatttgaaaacatttgctcctgttagagagtggggctggagtcgtgaagaagaaattgactatgcagtcaaacatggtattcctgtaagtattaatcatgattcaccttattcgatcgatcaaaatttatggggtcgtgcaaatgaatgtggtattttagaagatccctatgctgctccaccgaaagatgcatatgatttaactgctgaattagaggatacaccagatataccagatgaaattatcttatcatttaaaaatggtgttcctgttcaacttaaccataaagactatgatttagatcagctaattctaacattaaatgatttagctggtaaacatggtatcggacgtatcgatcacgtagagaatcgtttagttggtataaaatcacgtgaagtatatgaaacaccaggtgctgaagttatattaaaagctcataaagctttagaaacattaacattaactaaagatgtggcgcattttaaaccagtcattgaaaaacaatttgctgaacaaacatataatggtttatggttctcacctttaacagacagtctaaagcaattcatcgatagcactcaacactatgttgaaggagatgttagagttaaattatttaaaggtaatgctattgttaatggtagaaaatcgccttatacactttatgatgaaaagttagcaacttatactaaagaagatgcttttgatcaatcagctgcagtcggctttattgatatttatggactgccaacacaagtaaatgcttatttacatggaggttatagtaatgagtaataaagcatggggaggtcgttttcaacaacaacctgaagagtgggtagatgtgtttaatgcttctattgactttgaccaaacgcttttagatgaggatattcaaggtagtattgcacatgcaacaatgcttgcacaccaaaacattatttctgaagaagaaaaaaatgctatcgtaaaaggtttgaaagatatacaggcagattttcataaccataatattgaatttaaacatgctttagaagatatacatttaaatattgaacatgaactgatacaacgcattggagatccaggtggcaagttacacacaggtcgtagcagaaatgatcaagtagcaacagacttacatctatatgtaaaaaaacaggtcattgagattcaagcacttattcgttcattccaagaatctattttaactctagcaaaatctcacgtagaaacgattatgccaggttatacgcacttacaacgtgctcaacctatttctttcgctcatcacattatgacatatttttggatgttggaaagagactatacacgttttgcagatagtttaaaacgtattgatatatctcctcttggcgctgcagcattgagtggcactacacatcctatcgatagacatgaaactcaagaattacttggttttgaatatatttatgaaaatagtcttgatgcagtgagtgatcgtgattacattattgaaacattgcataatatatcattaacaatgactcacctatcacgttttgcggaagaaatcattttttggtctacggatgaagcgaaatttattacactatctgatgcattttctactggttcatctattatgcctcaaaagaaaaatccagatatggctgaactcattcgtggtaaagttggacgtacgacaggacatttaatgagtatgcttgtcacattgaaaggcttgcctcttgcatataataaagacttacaagaggataaagaaggtttatttgattcagttcgtacgatgaaaggttctttacgtatttttgagggcatgcttaatacgttaacggttaatacaaatcgtttaaatgaaactgtacatcaagatttttctaatgcaacagaacttgcagattatttagtagccaagaatgtaccgtttagaacagcacatgaaattgtaggaaaaattgtctttgaatgtattcaacaaggcatctatttattagatgtaccatttgaacgttatcaagaattaaatgataaaatcgaagaagatgtatatgattacttaaaaccagaaaattgtttaaatagaagaaaaagttatggttctacaggccaagatgctgtgcgtcatcaattgaacgttgcagaaaatattttaaaacaataatgaatactattattaaatgactatgaatcgaataaataaagattctaataaagcatctacttgaggattaactctaaatcgcttaatcgttttataagaaggggtttgattttgtgaagatcacatcatttgtgagaataagtactgaagtttcctttcgtagagtcagttaagtcatgttagaatttttatacataaggtacttcgttaatttagtttagtgttgtttattaaattatacgaaagtgccttatttttttaaatatttcactgtaaaattacatatacatacaaagtaattgggcgagactcatttttagttaaatttaatttaattattttaactttctctatatttattgttaataaattaatagttttgctaaaattttgaaaaaattattctaaaaatttcttctctttgctaaagttttaatgtatttttaaattgaattgagaggatgagttttttgaaggtttctaaaaaagcaatgatatctagtttagcaatagccactatcggtttagtaacattatataatccagtagaagcaaataataatcataacaaccatagcaatgcttctaattctgctacagcacatcaacagtttaatcaatcacaaaataaatatacgtcagtagcgattagtaaacatcgtaatcaagatcattcgaattggatgaccaacttaactggcgaacgttttacgactatcgctcatagaggtgcaagtggctatgcaccggaacatacgttgtatgcatatgataaaagtcataatgagttaggggcgtcgtatattgaattagacttacaacgtacgaaagatggacaacttgtagcaatgcatgacgaaaccgttgatcgtacaacaaccggtacaggtcgtgtcgaagactatacactcgcacaacttaaacaactagatgctgggtcatggtttaacaatgctcaccctgaatatgcgaaaccagaatataaaaatgctaaagtccctactctagatgaaattttatctcgatacggtacaaaggctaattattatattgaaactaaaaatcctaatgtatatccaggtatggaagaacaactacttgaaacgttaaaaaaacatcacatgttaactggtaactctttaaatcatggacatatattaattcaatctttctcagaagaaagtttacaaaaaatgcaccaattagattcaagcgtaccattgattcaattacttgataaaaatgaattgcaacaacaaagtgaagcggatttaaaacatattcgctcatatgctataggtgtcggcccagattatactagtttaaacgctgaaaacactaagcatttaaaagatttaggtttcctaattcatccttatacagtagataaaactacagatatgcaacgtttaaaccaatatggtgttgacggtctatttacaaattttgctgataaatataaagctaccattccaaacgagtaattttattaattaaaaacctctcaatgacgagtaatatatttctcatcattgagaggttcatttttaatagttatatttacgcccatccacgataacgtgctgcttcagcggtccgtttaattcctacgatataagctgccaatctcatatcaatttttctattttgtgctaattcataaatagtatcaaaagcctcgattaatttttcccgtaatttttcatttacttcatcttctgaccagtaataaccttggttattttgtacccattcaaaataagatactgtcacgccacctgcacttgctaatacatctggtacaagtaaaatatcacgttcagttaaaatacgtgtagcttctggagtagttggtccatttgccgcttccacaacaatatcagctttaatatcgtgtgcattatcttctgtgatttgatttgaaattgcagccggtactaaaatatcacaatcaagttcgaataattctttatttgaaattgtatcttcaaataagttagttacagtaccaaagctatcacgacgatctagtaagtaatcgatatctaagccattaggatcatgtaatgcaccatacgcgtctgaaattccaactactttagcgcccatatcatttaaaaatttagctaagaaacttccagcgttcccaaagccttgaatcacaatacgtgaccctttaatttcttttcctctacgcttagcagcttgttcaatagcaatcactacgccaagagcagtagaacgatcacgtccttgtgagccacctaagacaattggcttaccagtaataaaacctggagaattaaacttatctaaagcactatattcatccatcatccaagccataatttgagaatttgtaaacacatctggagcaggaatatctttagttggtcctacaaattgagaaatcgcacgtacatatcctcgtgataaacgttctacttcatgaatactcatttgacgtggatcacatacaataccacctttacctccaccataaggtaagttgacaatgccacattttaaggtcatccacattgataaagctttgacttcttcttcatctacatcaggatggaaacgaacgccacctttagtaggtcctacagcgtcattatgttgtgcgcgatatccagtaaatgttttaactgtaccatcgtccatacgtactggaatacgtacttgcaagaatcttaatggttctttaattaaatcatacataccatcatcaaatcccaatttatgcaatgcttctttaatgatgttttgtgtagaagtcactaaattattattctcagtcataatcactttcgcctctttttttcacaaatgttttcgctttcataagtattgtaacacgcctatactttttaaagaaattaaatcatgccctattacgtctatttactcaaatacacttctaattcgatttaatgcttcatctatttcttctttagtaataatcaaaggtggtgcaaaacgaattactgtatcatgggtttctttacatattaaacctttttctttcaacgcttcacaaaatggtcttgcactttcgtgtaattccataccaatgaataacccgcgtccacgaacttctttaattgcagggtgattaatcttttgtaattctgttttaaaatattcacctagttcatttgaatgttctggtaaattttcatcaataatgacatctaaagccgcaattgacactgcacaagcaagcggattgccaccaaaagtagaaccatgagaaccaggtgtaaatacatcaagcacctcattatctgctaatacaactgaaattggtaagacgcctccaccaagtgctttccccaaaatatatacatctggcttaacattatcccaatcacatgcaaataattttccagttcgtcctaatccagcttgaatttcatcagcgataaacaaaatattatgttcatcacataaatctctaatggttttcaaataaccttctggaggaatattaatacctgcttcgccttgaataggttcaactaaaacagctgctgtattttcattaattgcttcttttaattgtgcttcattaccaaagtcaactttacgaaaaccctctagtaaaggaccatatccacgttgatactcagcttcggatgataaagacacaggggccattgtacgaccatggaagttcccattaaatgcaataatctcagcttgatttggttcaatacctttaacgtcataggcccaacgacgcgcagcttttaatgctgtttcaactgcttcagcacctgtattcattggtagtgctttatctttaccagctaatttacaaattttttcgtaccattcccctaagttatcactatgaaaagcacgagagacaagtgtcactctatcagcttgatgttttaatgcttgaataatttttggatgacgatgaccttggttaactgctgaatatgccgataacatatctatatatttattaccttctggatcagtaacccaaattccctctgcttctgaaacaacaattggtagcggcacatagttatgagcaccgtaatggtttgttagttcaataattttttcagatttagtcataatatctcccctttgcttattgttatattaaaactaatcactatatttactggctttcgaaactctattttaaaatattaaattctctctaactccataaatgaaagcccttacaaacataatgacatatccccttgacattttacaagtaaattatttctattatctaaaattttgatataaacttttttctcttaataaaaaaaggtagtggacaaaattcataatgaattctgtctcactaccaaactatttcatattttattaattatttatctttacgaggtaacggataaaatcctttattaaattgttcccataaatttggtggtaacgcatgtttatcttcacgatttgaatcaaagtatgagatgatttcctcttctttaccctcttcaattttattgacaaagttataatctagaagaatgccacgacctaatgctacgagttcaatacctgtcgattctactgcatctaaagcatcatcagcactaaatacagaacctataccaataactggtatacgtccatctacccattgatggataagttttagacgttcttctccttcatatttaccctcacgtgtttgtgaatgaatatccataattgaaatatgaacataatcaatcgcttttttcgtaattgttttaattaatttttctgtgtgttccattgaaataccaggcgattctgcttcttctggtgataatctataacctacaataaaatctttatttgcataagtttccttaacttttaatacttcatcaatcactgcaagtgggaattttaaatggtctccccattcatcttcacgacgattatagtatggagagaagaattgatgaattaagtaatggttcgctccatgtatttctacgccgtcaaacccagcttcaatggcacggcgtgtagcttcaccgaaatctttaattgtttgttcgatttcttcagtagtgatttctctcgcatgatgttcctgttgttgaccaaaacttttcattgaaacgggacttggtgccacaacatctccattaggagtcaattcaggtaaagcttgtgcaccaccatgatgaatttggactaatgcttttgcgccatttttcttcattgctgtcgctaagcgttttaaaccttggatatctgaatcgtgtgcgacagagggttggcctgggaaggctttaccaatatcatttacattacttgcagcattaattgcaagacctacatctttggcacgtttctcaatgtaagaaatttcgacatctgaaatggtaccatcatcatttgatgatgtatgtgttaaaggtgcaagtacaaagcgatttcttaatgatacaccgttttgtaatgtaacagtttcaaataattttttatatttattattcataagtaattcctttctaaatcttttagtttttttattttcaaactataacatgaacatttttatgtctctacttttatgcttatatgcattaatcatctttttatatttagcaatatattgacataataaaaaacgttacttaaaaaagtaacgttttagcgtgttgacagtcattcaattattattacgaattgcacgtttagactgcttaatccagaccggtaggcgttcttcaagcgtttgaaacccatacttttctgtctctttaatttcatctaatacagactgtttttctttttttcgttcataattcttaaagtaatcattatctttaagtgacaaattaagctttccttcatcgtctatagaaagaattttagcttttacaatttgaccttctgatagaaatttttttagattatggacataatcatccataatctctgaaatatggataagtccttcagtatggtcaggggtctcaacaaaagcgccatacggttgaattccagtcacacgcactttaatatgctgaccttctttatagtgagtattcaacttgataaccccttatttcgttttttttaacatattaataatagcataaatcccatacttggactaatgataaactaataaaaaattaatttctttagaaatttatatttcttcttcctaaatttacattaaaaagttcgtttttaataaaaaaagatgagcgtaaatgtcttatttaaaacagtttatgctcacctatttttatttaatgatatttcattgacgagttaagcttttttgtcttctacatcaatcgattcaataacaacatcatgtacgggcttatcttgtgcccctactttagtatttgcaatatcctctaatgtagtttcaccatcgattaattgaccaaacacagtatgtttttgatctaaccaaggtgttccacctttgtctgcataagctttagcaattggttcaggccaaccgccatcaacaagctgattaagcattgtatctggtacttctttcatttgaacgacaaagaattgtgaaccatttgtatttggaccagcatttgccattgaaagtgcaccatataaattaaatgcttctaatgaaaactcatcctcaaatgaacctccataaatactttctcctcccataccagtagcagtaggatctccaccttgaatcataaaatcattaatgacacgatggaatgtaatgccgtcataatatccattttttgcatgtgtcacaaaattttcaactgtttttggagcaatctcaggaaatagtttaaatgtcatatctcctttatttgtatgcatgattactttaatttcattatcttgtatttctttatttaactgtggatagttagtcatttaaattctccattcatgttatgatgatatagatacataataacatatttgaaaggaagtaatatagcatgttatatcgattctctcataagacaggtgcctatggtgtaacgattaaagaagataacaatcatcaagttttagtacaaattgaacaagtcattaaacatcctaaacaaggagatttacatcatcctggtgaaactgaaggtgttttttttcatgaaagacgtgctttaagccattatgaaaaacgttatgcaacacgttcacaattgagagattttaatgtagaagaaatgaaatatgaagattctttacaacaagcgattactaaaatggaaaacgaattaaaacaacaacacacagaatacgcaaaattggcattagacaatttaaatagtctaaaaaaagactattctatccaatataaacaaaattttttctagtccattttacgtctttcttcctatttaacaagataagtaaaattgctgactttacatcttttcacagtttttcagaataaattgattcatgtataataaaatttataacaatttttgaaggaggaaaatatagtgagtttgatacatattgcggtacttttaccgttaatattcgcactcattattccaatcctttatcgtttctttaaaaagattcatttaggatggtttgtattacctgttcctgttgtcttatttatttattttttaacttatatttcaactactcagtcaggtaatacagtaataaaaactttcaattggatgccacatattggtatgaattttgatatttatcttgatggcttaagtatactctttagtttgcttataactggcattggaagtttagtagttctttattcaatcggttatttagataaatctgaacgattagggaatttttactgttatttattactgtttatgggtgcaatgttaggcgtcgtactctcagataacgtcattatcttatatctattctgggaattaacttcattctcaagttttttactcatttctttttggagagaaaagaaagcttctatatatggagcacaaaagtcactgattattactgtatttggaggacttagtttacttggcggattaatcttaatttcacttgcaggacaatcattaagtctacattatttaatccatcatgtatctcaaatacaagacagttctttctttacacttgcaatggttttaattatgttagcagctttcacaaaatctgcacaagtgccattttacatttggttacctgatgcaatggaggcacctactcctgtcagtgcatatttacattcagccacgatggttaaagcagggttatatcttgttgcacgtttaaccccattattcgcggtatcagaaggatggatatggactattactttagtaggcttaatcacactattttgggcttcattaaatgcaacgaaacaacaagatttgaaaggtattctagcgttttctacagtttcacaattgggaatgattatgtctatgctaggtattggagctataagttatcattttgaaggtagtgaaagtcaattatatatcgctggttttacagcagctgctttccacttaattaaccatgctacctttaaaggcgcattatttatgattacaggtgccattgatcatgtgacaggcacacgtgatgtaaaaaaactgggcggtttacttactatcatgccaatttcttttactcttactgtaattacagcattaagtatggcaggtgtgccaccatttaatggtttcttatcaaaagaaaaattcttagaggctatgatagaagctacacacgcacctctatttagtttaaatactctaggtattatttttccaattttagcgattgtaggtagtatatttacatttgtatattcaattaaattcgtactacatgtattctttggtaaatatcattctgatttattacctaaaaaagcacatgaagcatcattattaatgttaatttcaccagcaattctagcaacgctagttgttgtttttggactattccctggactattaacacattctataatcgaaccagctactaaagccataagtggaatatcaaccgtacatgcagaattccatatgttccatggtattactcctgcgttcatctctactttaacgatttggattgtaggtattatcttattatttacgttcaattactggattcgtttattaaaagcacaaccagacaacttaaaattaaattattggtatgatactactggcaaatggttaccaaatcattccgcttctctaactaattattatgttaatgggtatgtacgtgacagtttagtctttatttttggtacattaattgtgttaacactcatcacattagtgagtgtaccgtttagctttaattttaaaaatataaatacaattcacatctatgaaatgattattatcataatacttactatctcagcgttcttagttgttacagcaacatctcgtttatttagtattattatgcttagtgttgttggctatgcagtatcggttttatttgttttctttaaggcacctgatttagctttaacacaatttgttgttgagtctatctcaacgggtctatttctattatgtttctatcacttgcctaacttaaatcgctataatgaaaaaacatcatttaaattaacgaatgctatcatctctattggtgttggtttggcagtgacaatgttaggtcttatcgcttatggtaatagacatttttcttctatcggagagtattacaaggcacatgtttatgacttagcacatggtaaaaatatggttaacgttattctcgtagacttccgtggaatggataccttatttgaatcttctgtattaggtattgcaggtcttgcagtttacacgatgattaaattacgaagtaaacgtaacaaaacaagtgaggtggaaagcaatgaatagacaaaataacaatttaatgtttcagtattcagctgtaattattgctttcttaattgctctttttggtattactttatttttagcaggacattacacaccaggtggaggatttgttggtggattgcttctatcaaccgctttaaccattattatgattgcatttgatataaaaacaatgcgtaaaatctttccttgggattttaaaatcttaattggtattggtttattattctgtgtaagtacgcctatagcaagttggttttacggaaaaaatttctttacacatacagaatttaatattccattaccacttctacaccctgttcatatgaatacaccaatgttcttcgactttggcgttatgtgtgcagtaattggtacagtaatgactattattataacgattggagagaacgaatagtggaaattattatgattattgtatgtggcatacttacatcaatcagtgtctatctcgttttatctaaaagtttaatacgtattattatgggaactacgctgattacacatgcatcaaatttatttttaattactatgggaggattgaaacatggtgaaatgccaatatatgaaaaagatattcatcactatgtagatccaatccctcatgcattaatacttactgcaattgttattgcatttgcaactactgcttttttcttagtcttagcttttagaacgtacaaagaattaggcacagacaacatagaacaaatgaaaggagtgcctagtgatgatagcaactaatatggttgttcttacattagttataccaattattaccgctattattcttatctttttaggacaacgctatccattaaagcgtgcggttacattgataggtttagttttaactttgattgtagcgatggttaatttaattaatgttagtaaatttggtcctcttaaagtagaattaggttcttggccagccccatatggtattatctttttattagatacgttaggggcaatgttgattgtaacgagtattatcattactctgctcattacggtctattctttttcaactgccggaatcgatagagagcgttattattttcatttttcaatcgtctttatgttagtgggtattattggtgctttcactactggagatatttttaaccttttcgtattctttgaagtctttttaatgtcatcttatgcattgcttgtattaggtggtacacgtattcaacttcaagaaacagtaaaatatttactgattaatgttgtaacatcgacatttttcgttattgctgttggtatattatattcaattgtcggcactttaaatatggctgacattagcgtaaaacttaatgaattatctcattcacatcaaggattattaagtattgtctttattttgttcatctttgtgtttgcaactaaagctggtgtctttccattatatgtttggttacctggatcatactatgcgccaccttttgctatcattgcattctttggtgctttattaactaaagttggcgtctatgctattttaagaacacttagtcttttcttccataacacaatgagtttttctcactatactattttattcttagcactattaacgattatatttggatccattggtgccattgcttattatgatattaaaaaaattattttatataatattatgattgcagtaggtgtcatactcgttggtgttgctatgatgagtaaattaggaattatgggtgctatatattacaccattcacgatatgttagttaagagtgcacttttcttaattattggtgtcatgtatcaaattaccaaaacatcaaatcttaagtcattcggtggtttaattaagacatatcctatacttggttggtctttctttattgcagctttaagcttggctggtattcccccatttagtggattttatggaaaatactttattgtaaaagccgcttttgaaaaaggattttatatcagtgcaattatcgtattactttcaagtttaatcgtactctattctgtgattcgtattttcctacatggtttctttggtgaacctaagggatataaaatgaataacaaagtaaatgtaaaacaagctacaatcgtttcagtaattgccgttgtcattactgtactatttggtttatctgctgatgcactttatccatttatatcagaagctgctaaatctttctatgatcctaatgtttatattaaaagtgtattaggaggtagatactaatggctcttcaatttgtgttaaatattatattagctattatatggatgtttttaagtggcagttatacatttaataactttttactaggatttttaataggaattgggcttgtttacttatttaaaaaagtattgcctggtagtttttatttaaaaagagtttataaagtcattaaattgattattgtcttttttatagaattaatgaaagccaatattgatgtatccaaaattgtgttacagccaagacttaaaaatcaacctggcttctttatttatcacacagatttaaaacatgattggcaaattgttttattatctaatttaatcactttaacaccaggaactgtcgttttaggtattagtgatgatagaactaaaatatacattcactcaattgattttagtacgaaagaagaagaagttgaaagtattaaatcatcacttgaaaaagtagtgagagaggtgggcgaagcttaatggtaaaaacaattattattattgctttaattgtcgtagtattatcgatgctagcaatgtttattcgtattattaaaggtcccactttacctgatcgcgtccttgcattagacgctattggcttacaattgatggcgtgtgttgcattatatagtgtgtttatcggctcacaatacttacttgtagttattttacttattggtattttagctttcttaggtacagcagtattctctaaatttatagataaaggtaaggtgattgaacgtgatagcaaaaatcgtcattagtttagccatcattttcattatcttaggtgcattgatcagtgcaattactgctattggtattattcgtttaaaagatgtctattcacgcggtcatgctgcaggtaaatctgcaacattaggtgctatatttttattatttggaacgtttttatattttattggaacagaaggatacgccaatatgcaactgatattcggcattattttcattttaattactggccctctttctagtcatttaatgatgaaagcatcatataataataaaacgccttatactaaagatacaaaaattgatgaacttaaagatgaatttaataataaaaaaatataatttgataaaaatcgaggtactttcttaaagtgcttcgattttttgttttgaaaaagatagttttatgttattataaatcgtaataattacgttttgaaggagttttattatgcattggactattattggtggcggtatacaaggaaccactatagcaattaagttacgtgaagcaggaatatccatccaaaatcttacaattatcgatcctcatgattctttatgcgaacaatttcataaatacacaaatagaattgatatgtcttacttacgttcacctattgtacatcatattcatcctgacccatttcatttaaaaaaatttgcaaaaatgaatcagtatattaatccaacttttgatcgttatcaaagacctcaaacagagatgtttatggatcacacatatgctcaaatacataactatcatctaaatcaatgtcatattcaaagttatgttcaacgcattgaaaaaaaacaaagaaaatggagtattacaacaagtcatcattctgtcattcaaactgattgtgttgttttagcacaaggatgtcataatgagccttttatcccttccgcatttactcaagctaaagacgtatgtcatatatttagtgaccattttaattctcaattattttcacaatcatctcatgtcattggaagtggtatttcagctgctcatttaacattaaagcttttaaaattagataaaaataaaatcgttcatttatggatgaataaaaatatagatattcaacattttgatgccgatcctggttggctaggtcctaaaaaaatgaaggcctttttaaatcattcttcacatgaagagaaacttcaaacagtgttaaaagaaagacataaaggttcaatgcctcgcgagttatatttacgcttaaagaaatatgttcaaaataaaagacttatcatccataaagaagagattaaggacttaaaatcgcatcaaattgttactgaaaatttaaatatcccatatgattacattcttttagcaactggatttaagtcttcaattttgcagcaacccatgatacaatctctaattcaaaatgctaacgcccccctcctatcttgtggatttccaaacatcacacatgaattagaatggttacctcatttatttgttgctggtggactagctgatttagaacttggtccatttgctagaaatatcatgggaggtaaagaagcagctcaaagaatttatagcgtatttcaaagaatagatcaccatagagaagtatcataaatataaaatactagcccgtagatgaatatttctacgggctagtattttataatttgttattttaatggtttaatccctattgtacctctcatgatactaattaatttatcttgctcacttttaatttcaatattccatacttgtgtcgtatgacctttatgaataatagaagcggtagcaatcacgcgtccctcttttactgagtgaatatgattggcattcatttctaaacctaatgggataaagtgtttcgtatcaattaaatgagcagcgcctaatgaacaagctgtttcacctaatgcaatacttgcaccaccatgtagatagccaaagggttgtttaaccttatcagtgactggcatagaaattacaactattccctcatctactgtttcgatttccatatcaaatgtttcaagtaaattagacatgttgtcacctctttttttctataataccattgcagctattgtaccaaaaatcatcaatggaacattatagaaaaggaagttaggtatacatgtatctctaatgtgatcatgttgaccatctacattaagacctgctgtgggtccaagtgttgaatcacttgctggtgaaccagaatctccaagtgcagcagctgttcctactaaagcaattaatgccatattatctaaaccaagagatgaacctagtggtataaataaagctgcaataattggaatcgtagcaaaagatgatccaatgcctaacgtaacaataaggccgacaatatacattgcaataatagtaattaacttatgtccatttgtaatctcagttaaactagaaactaatttttcaatatcaccagtagcattcatgacaccggcaaaaccgttagctgataaaataacgacaccaataaatgacattatttttattccttctacaaattggctatctaattcattccatttataaataccagaaataaagaatatcagcactcctgctaatgctccaaaaatcattgaatccgtaaatgtttgaactaagaaagtagcgaaaatagcaacaatcgtaataactaatacatatggccgaatttctgctacttcttctccattatctttcaatctctcttgcttatattcacgtggtttacgataaacaaacaatccaataactaaaccgacaatataaccaagtgaaggaattaacattgctttccaaatcatattaaattcgataggatgatgcgctttttgaaatccgctttgtataatttggtggaaaatctgtccaaagccataaggtagtaaaacatatggccaacataaaccaaatcctataactaaaccaattaatcgtctatcaattttcagatcgttaaatagactaagtaatggtggaattacaattggtataaatgcaatatgtactggaattaagttctgactcataatactcattgctagtaatactaaaataataatcacttttactttaatccttgataagcgactattctcagtatgaattgcacgaataattttatttactaaataatctgtgatgccactatacgatatcagtgctgcaaagccccctaataaagcgtaacttaatgccacttccgaaccatctacaatatttttaccgaatacactaattactttgtttaaactcatgccagatattagaccacctacaagtgaactaataaataaactaatgataacattcagccttaagagacataatataatcattaatattacagcaataactacagcattaaacattatactcacatcctttattactctaccgaactaaagtgtataattatgtgattaataatatcaagtagtcaggcggttgtcaacgcctaatataatagtattttaaaaatgttttaaaaaaataaacgtctaaggtatcaatttacctcagacatttatctattttgtctcaaaatgaatgtatattcatttctaatatctattctattttgattgtcgtaaccaattcactatggtcattatcatgcttcctgtcggacctttaggacctttatagttatctttattaatcgtcgcaggacctgcaatatcaaaatgaatatgtggcgtttgcccactaaaatgcgtaacgaaagctgcagcaaataaggctttaccttgtccatttgtatgattcactaaatcagcgacatctgtattacgaatcaattgttgttcagtttgagtaataggcaattcaaaagcgaattcatcaacttctctagcactttctaaaatgtgtttcatatcttcatctgcattcgaactaaataaagccgccttatcttctcctaatgccgctatagcagcacctgtaagagtagcaaaatcacatattaaacgtggttgaaattgatttgcataaaatacgccgtctcctaaaactaaacgaccttcagcatcgctatttaaaacttctactgtttcaccatttaaggcagtatatacatcatctggtttcatagcctgttgactaatcatattttctgcagagacaatgacacctacaatatttactggtaaagataatttagacgcagcatcaatcattcctacaacattagcagcaccacacatatcaaatttcattgtttgcatccccattttagatttgatgctataaccaccagaatcatatgtaatccctttcccaactaatgcaataggcgcttcatttttatctgttccatgatacgttaaagtaataacaacaggagggtgagtggatcctttacctacagcatgtagtaaaccaaaaccttctgataacaatgtgtcattatttttaatatctactgaaacagaagacgatttaaagtgatgtgctactttatttgcaaagtattctggagtaagtatattgggaggcatattactaaagtcacgtgctatattcaccgattcaccaattaaatatcctgcttttatattttttatatcctcatcactattagatgattctatatataattccagttgatatggtgtggatttgttagatttatagttgttaaattcataaatcgattgtctactttgtaatccaaaaatctctgcaatacttgttttgtcaattttttttgaattaaatgtctcaaaaagaacattggcttctgtaacacgttctttttttagatattgaaaaagtgtaccaaacacttttaaaaatgaagcataagataatgttttcaaatttcctagtccaaccgtaattaaacgtttaggttcattatttatgtataaaatagtcgaagatgtttttcctaattgactacttacaatatgacgatgtcggtcattttcaatagtttgtgtaaggtcactattttgatacgtgatctttccaatttgattaagatgatcgggtactcctagaataataacgtcggtcattttattcgaatcataattaaaatgtatcatataactctcctttaaaataaaggagtgagatattgaaatctattttgcttcacagatttctgtctcactccttaatgattaaatatttaatttattaacttagaatttaccttttttaaatgctaagccaacgccacccattttgaatacagcacgtgtatcaatcacttttttcatgaacgcagcttttttaccagtaatgtctctaccaaacacatgacctacaccatcatgtgaacctaaagaacaaactgtaccacgatcaatatattcgaaatcagttgtagcttggccatttaagatattttcaatatttttagcaacatgcgcaccttgttgcatagcaatttgagcagttgttggtaatggacgttcctcacctgctgggataaacgcagaaacatcaccaataacgaagatatcatcatgaccatcgattgttaaatcttgtttagttacgatacgaccacgttttacaccttcgaatgattcttccataagttgactaccgcgaactccagcagcccacactgcagtattggcttcaagttgttgttcttgatcatttgttttgactttgaaacctttttcattacaagcaacgattggcgtaccaattttaaattcaacgccacgttcttctaaataatttactacataatttacaagattttctgagaacattggtaaaattttaggcatagcttcaacacatgtaattctaactttattttgatctacgccatatttattacataattcaggaattctatctgttaattcacctaagaattcaatacctgtaaatccagcgccacctactaaaattgctaaatcattttcatctttctcttttgatgcagcgtagttagcaaatttatcttcaatatgacgagataattcgcgagcagtatgaatattttcaatttggaatgcatgttctttcattccgttaataccgaatgtttcactttcaaatcctaaagcaacaactaaaatatcatattcaaaaataccgtgagtagtttctacttttttagcatttctatcaattttagttacttctgcattaatgaagttgactttatttttgtcaattacactttcaattggataaattaaatcttcataatttaacgtaccagctgacgcttcgtgtaaccaagttgcttcataatgatatttgtttttgttaactaaagtgatttctgcttcatttgcagatatttctttttgtaatttagtaactgcttgtaaacctgcatatcctgcgcctaatacaagtacttttttacgattttgtgccatttcattcacctaagctttcgtattttttcttaaatgtagataaaggctacaagtttcagaacatgttgaaacatagcatttttataatacaatagtattgtaaaaatgctaattgtttcgaaaaactttgaacttaacctatttgttcatccccatttatagtcttagtcaacacttttatatccattttgtaaacatttattcacaaaaaagacaaaatttaatccacttccaattttatagtttttatattatattttcaagcaacaacagaacgattatttaaatttattattactatattgtattaacttaagaatatgaaacttaacaattttcaggatgtccagctacttttgctgttctaaaagaactgccgcatccgcatgatgcaattgcatttggattgtcgatttggaacccaccacccattagtgattgtttaaaatcaattttagtgccattcagtacgggagcatcatctttatctactaaaacttttaatccataatattctaatacttcatcatttgatcctggagcttcttctgcagacataccatatgttaaacctgtacatccgccaccattcactttaatttttaaataaccgttttccatatgattacttttcaacatgtcttttacttcataagctgctgcttcagtaagtgttactgttggcatttctaatcactcctataataagtttgtaaaatcattttcttctatgtgtttataaatattgtttaacaaatcttcaggtgtatccccttctacgacttctccatctaccaatgcatataacccagaagaacataaaccacaattattgagacatccatattctaacacatctacttcaggatcactttcaagtttatcgtaaacgtagtctccgcctttggccatattcgatatacagaattcgactaatggaaacatacttcaccttctttttaatttaattacattattataacaaatctctttatatgttgcattgctatggtttttaactatttgtattttacaataacattttacattcatttgtcgttattattaaaaacatatataataaaattatattaatctttcatttatttgttaggggacaataaatgaaaaataagcgttaaaataggctgaatcacttaatattgaacctatactttatttatacaatctgaaattataaaggtctgacattcataatacatagccaattgattttaatgtaaaggggtaacataatatgaaaaatttagttctacttggtggaggatatggtaatatgcgtattatgtcgcgcattcttccagatgttcttcctcaagaatacacattaactcttatagatcgaatgccgtttcatggtttaaaacctgaattctatgcactcgctgcaggcacaaaatctgatagtgatgtgcgaatgaattttcctaattcacatcgtgtaaatacaatttatggagaaataagtgatattgacttagataaccaaattatttcggtaggacaaactaaagtagattataatgagttgattatcggactaggttgtgaagataaatatcataatgttctaggagctaaagaatacactcatagtattcaaacgctttctaaagcccgtgaaacgtttcatagtattagcgagctacctaaaggagcgcgtgttggaattgtaggagctggtttgagtggtattgaattagcaagtgaactacgtgaaagtcgcacagatttagaaattattttatatgatcgtggacctcgtatattaagaaattttccagaaaaattaagtaattatattgcgaagtggttccgcgaaaataatgtaaacgtggttcctaattcattgattgataaagttgagcaaggaacaatttataataatggtacaccagaacctgttgatattgtagtatggacagcaggtattcaacccgttgaaattgtaaggaaactgcctattgatactaataaaagtggtcgcgttatcgttaatcaatatcatcaagtaccgacttataaaaatgtttatgtagttggagattgcgcagctttaccacatgcgccaagtgctcaattagcagaagtacagggggatcaaattgccgatgtactaaaaaaacaatggaatcatgaaccacttcctgaaaaaatgcctgaattaaaagttcaaggtttcttaggttctctaggagagaaaaaagggtttgcctatattatggatcgtacagttacaggacgtttagcgcatatattaaaatcaggtgttttatggctatataaatatcataatggataaatacaactgggaagcgggacagaatttaatttcaattcatcatctcaagcttcccctcatttttataaaaaatcgaatactccactttgcattaattatttataatatattgatctataaaatgagtcactttttttgactgaatataaccgtcagccacatattcatcgttcattgtaataagcgggtaaaacaactcatcattttcaatttgctcaatatattgttgatcatgatcacttaaattttcagtttctttttgaaaatcgatatatgtatattcgaaatgaatattaggatattttctttctaataatggttttagccactcatacgtatttttagaagttggtgcattgacacaactagcacacactacatccgcaccgtaaacaacaacacttacttttgtcatatattaatcccccgtttagttttatagatttttctttctttatctattataataaattaataataagtttatgaagtattttacttgaaaggagacatatctcatgcctactgagaatgcaacaatgtttgatcaagtagccgaagttattgaacgtttacgtccgtttttattacgtgacggaggagattgtacattagtcgatgtagaagatggcatcgtaaaattacaattacatggtgcgtgtggaacatgcccaagctcaactattacattaaaagcaggtatagaacgtgctttacacgaagaagtaccaggcgttatagaagtagaacaagttttctaacgatataaattaaagacaccctacattcagtatttaatcagaatagggtgtcttttttcatttactatttagaatgagcttgataatcgttcatatgtttttcaatttgacgatccatgtatacccaacctttccaacctacatgtactacatcacttaatacatatttttcatagtctttatttgacatatcatacactttgccaccatgtccgacaacagttttatgtatttttttatagacaggttcacgtgttgaacggtgaatacctaaatgatcgtaccatttaccatttactggaagaataacatattgtacatcagcacctgcttgatgcattgtatctactagtaaagataaatccttaaactctggtgaattcattttaaattcatattggcgacgattcattggttttttatgcattagttttttccaatattcgttacggataccataaccattagaagtagaacgtttttcaccaagttgcactgctttattactcatgtttttccaagaatcattgggtgatgtaagtgagtgcacatgagttaatggtgatttatctaatgaaaagtatgtttttattgcctcaattttaagaagttgactttctttaaacttagaaatataacgaccttttgggttgcttggatcttttactaattcttttaaatattccttattaggaacacttctaaattttaataatcgtttagcatagcgttgttttaattctgaaggcatatccttttgttgaaatatctgattgatttgatttggtgtcgtacgtgcagccatatccatatcattaacgccatgtgtactaaaccattgtggtgaaatgataaatgtcatctttttacctttaagttgatcatattgacccgctaattcaatagcattaattaaatctgtattaccacccgtaccaactaagaatacaggctttgtattttttcgatgatgcattgctatcgcaggattaaacgggtcacgtttatttaactcacttgaaccataaagtggataatatttatcattactaaataattgattttgaatgagcgtacctttaagtacttgatcagttagtgacgttctattatcagcaagtgtcttattgttaacgagaccagtaaaccaactcgcaggcattaatacaaaagctaaaaatatgattccactaataagaattggtaaaaatggtttgaatttcatcgtaattcttctaaagcttcaacaattttattaggagttgcccattcatcgcgatcaaaatccataattgatacttcaattcctaatctattttgaatttctaataataatccaactgtttgaaatgaatcaataattccttcttcaaaaatctcaacatctgggttttctttaactacgtcattttctgctacatcagctaatacatctaaaacttgttctctaaattccatcatttatttctccctttaaattaattttcctgagaatattaagaagccaaatgctacaaaatggaatgtgataataacacttaatgctgtagcaaaaccattttgaaagcgaggtggatgtttctttctccagcgttcataatatccatatccgataaacattaaaccgtgataaataccatatacaatataaaatacttctaatccgtgccatacacccataataaagaaatttaagaagaaggcaaaatttgacattgcaaattgattcttcattatttttttacgagacatatagaacaatgttctcatataaacacagtctctaaaccagaatgataatgacatatgccatcgattccagaaatctttaatgttacgtgctttaaacggctgtttaaagtttggtggtgtattaatgccatatagataactcactgctattgcaaataaactataacctgcaaagtcaaaaaataagtaaaagctataggcatacatatataaccatttatgagtaaaaccatgtaaatgcattaataatggcataattgcatatacattaattaaatgagcaataatatatttatataagaagcccatcataatcatatgaatcgctttaactaccatacctctgtattgctcaccagttggtatttttttatcgtctttgacaaaacgtttataacggtcgatgggtcctgaagatactgttggaaagaatgaaataaattgaatcaatttccccactttaatttctttaatagaaccatctctaatttccattataagttgtacacttttaaaagtaacatatgagattcctaagaatccgacaaattcaattaacttatgttcatggaaatgtatttgatgtccacctaaccatgaactttgtaatattttaacaagtgctaaaggtaaaatagataaaatcataacaattaaaaatttaataaaagtattatttttttgtcgtgatttgtaataccacatgattaatagcacttgccatattaaataaattacaaaactgattaattgaacacttaaatatttctgtccaaataaattgtatgtatctgaagagaaaataatcacaatcataatcactgtacttatcccattgtatacatagcttcgcttacctaaaaatccgagtatgatgactggtaaaagaacgataaatgcgactaagaagaaggtaaacgtaccataaggaatcatgcgtcgatatcctctgcaacttgtttacgatcaagttttccatttgatgttaatggaagttgtttcatccaaacgaattttctcggaatcatatattcaggtaagcgagatttcaattcatttttaatgtttctagtcatctctaagtcattatcaacttttttagtaggtacaatagcacctacaagataaacaacttttccatttttataaattggcacaacaacagtttctctaacgtattttgagtgtcttagttgtgtttcaatttcttctagttccatgcgataaccgtttaactttatttgaaaatcgatacgtccttggataaaccaataaccatctttttcaatagctttatcacccgtgtgataaatgcgaacgccattatcaaacttaaatactgcttcagttttttctttgttttttagatatcctaaactcacacttgttcctttaataacaagttcaccttcatcagttgttgatagtgtagtattcggtcttgctacacctactggaagtggattataacgttctaaaatctcgggtgtgatttttacaccagtaactgcaactgtcgcttccgttggtccatatgtgttataaacaattgcatttggatatctatcaacaagtgctttagctgttctatgcggtaaaatttctccacaaaagaagaaatgatttaaacttggataatctttttcattaaggttaggaagtaataaacacatttctataaatgatggtgttgatacccaagcattaattggcgtttgaacaagcatttcatttaataacttcggtttttttatcatatctttatctactaagttaagtgttccaccagatgttaaacatggataaattgccattacagataaatcaaatgaaaatggtgcttggttcaaccactcctgatgattatctgtttcatttaatgagaccatccattctgcaaactctattaaactcgcatactcaatttgcacacctttaggctcacctgtagaaccagaagtgaatatagtataaacaacatctgttttatccatttgactatcaaaaacaataggataatcagaatgtttaatatcttcgattgtaagttctttccttggttgattcacacttgaatcagttgtatttaaaataaatgttggatctactttattcataatcatttctacacgttctattggaactgacgtatcaattgggacatagccacatcctgctttgattgctcctatcattccaactaccatatatggtgacatatgaccatagatgattaatggtttatttgtatcttgcaaataatgtgctagcttactagattcttctataagttgacgatacgttaactcatctgatttatgtctaatagctactcgatctggatttttttgtccaatatcattaattaaatttataatatctgtcatcctttgactccttactagaattcgttatatataaagttattatgtgtatcgcctgaaccatatataagatacaaagctataaaaattgctaagtatagaatagtcagtagatatggttttgctttttcataaaaaacacttatttttttagtttctttcaattgaatattgcacctcacaaacattgctatttattttgaagaacaattctacttattttatatttagtaaagttatcttactatcaagaaatattatatcgcacttttatttttacactttattatataaaaatattaattatatatcaaatttattttatataataattagtgagtgttaaatatgtatctatcttatccgatatgtccttattcttatctttgatattctatatattagtactaatggttacatatcacaattacacagagcataacaaaactgttagatataaaaacttcttattactcatatcatcaatttaagtaataagaagttatcatagaaattatttttattaattagtattactttctaattcagctatagccacattcaaatctttaaatgaataggttggctttggttgtttagtttgaatttcttcataagatgttacacctgtttgtacatgtaccgtatccatccccacattaataccagacatgatatctgtatcatacaaatctcccaccatagccacttcagacttatctagtttcaagatatctaaagcaatttgcatgattatggtttctggtttaccaataaattgtggctgttgtccagtagatacactaaccacacttgtaatagctccatttccaggtaagaagcctctttctttaggaattgagacatctggattcgtagagataaattttgcgcctttacgtactgctaaagtagctattgcaagtttttcatatgtgactgcttcatctaaaccgataactacgtaatctacattctcatcttcttttacggttaaacctgcatcggttaatgctgttcttaaaccattacctcctagcatatacacactagcttgactattttcttctgcaatgtaatttgccgtagctagagcagaagtaactacttcgtctggtttagcgtcaatcttcatttcttttaacttttctgttacttcttcaggcgtcttagtagagttattagtaacatataaatgaggaatatcgtttttgttcaaataatcgataaattgagcagcaccatcaatttctgctgtacccatatacattgttccatctaaatcgattaaataacctttataatttttcattatgaataatctccttttccaaaagcggtaattggcacattttctttttttagaaattgagtaacttctttcacaaattgtcgataatacggtattgaggtgtcaaataatggtacaagtgtttcaacttctaattctgtataatgatgtgcaaactgttttctgatttcaactgtatcattaatatggttttgtgtatctttggaaatcaccccttcaagttctaaaatatcaataacatctttatagttaccaggatctctcaaaataaaagcgtcaataatcatatttccaatatctactgatgattcaattaacatttgcgcaatacgttcaaatgcataatgatttgatttatttgtttcataatctttaataagctgatttaaatattttattttaagtgctaatttatctttatctacaaaatacatatcggtcacctcttattattattatcatatcatagttttgcatcatgcatcatttgtcgttatactaatttcacatattaaaaataaaggagcatgactgatatgatagatatgtttctgtacgatgatgaggaacaatcgcaagcacaatttgtaggatttgtaggtgaacatagtcgctatgatttaatgcttattcagaccgatcgtcattacggcaaaacactggtattaaatcttcaaactaataaatttggcatcataggcacagacgatattgaagaagaaggatatattgctcatatattaggtgtctctcaagaagaaagcgaagaaatcattgaatatctaaatcaagttattcaataaatgaaaggtcaaaacaatgtatattttgtgaatatcattgttttgacctttcattatttattattctttttttcagtagattgtgtagtttgtattgttggttttattttcacatcatgcaatttatcttctacttcatctacattagttaattctaatcgttcattctcattaatatgtctcactataaaatatggacaaccaaaattacaatattccaaaatataatcttggatggttgaaaaacgttttgaaatttcagcttttttatttgaatctttataaaatccttttaaacgtaattgatcataaccaaaatctccaactacaaaatcatatttatcaagtatatctgaatatcttgaagcaaataattcttcatcaaagcattctctataatcttcaattaattcaaaatactgttgattaactttaatcataataagtcacctttaattataattataataaaaacttagattgcctattttaaagaaaaagagcaatctaagttttagcatctacctattaataaacattcttaattgactttatgtactcatatcattgtttcataagataatatgacttcattatgtgatatcgcttaaaagaaagtttattttaaatttttgggttaatattatttttgttgtaactgttcttctccaagacggtgtttttcttttgccgcttcatttacttgttcatcagcatgataagaacttcgtaccattggaccagcttcacaatgtttaaatcctttttccattgcaatttttcttaatttaccaaattctaatggagtatagtatttttcaacttttaagtgtttacgtgatggttgtaaatactgaccaattgttaaaatatcaacatcatttgcacgtaagtcatccattgtttcataaatttcttccaatgtttcacctaaacctaccattaaacttgatttagttggaatatcaggttgtaactctttagaacgacgtaagaattctaatgttctgtcgtaagtcgcacgcgcacgaactcttggagttaagcgtcgtactgtttcaatgttatggtttaaaatatctggtcttgaagccattagtgtttcaagtgcttcataatccccacccatatctgacggtaaaatttcaattgtcgtatatggattacgttcacgtactttacgaactgtttctgcatatacattagaccctgcatctcttaaatcatcacgtgcaacagctgtgataacaacatgtttaagattcattagttctacagactctgcaacacgttctggttcatttaaatctagttcattaggtaagccagtttttactgcacagaaacgacaagctcttgtacataccgcacctaaaatcataaatgtagccgtacgtctagctccccaacattcatgtatatttggacattttgcttcttcacaaactgtatgtaaatttttctcacgcatcattttcttgaggccgatgtagttttcattagtgtttagctttattttcaaccaatctggtttacgtaaaatctcttcatttttagtagccataacaacacataccctcctgtttaatctatcttcaactattataacgaaatttacattaaattaaaatgtaataacttataaaattaagacataactatgaacatttgtgtactaagaagaatgatgcatatgaattaatttttctttaaagatatctcttaaaaattccggcattaaataatcaatcgatgttccttttaataatgggaaatatcttccaaatgtatacatatctacagttcctaatatataggtacggttatcttctatttcttgtccatctacaaagaagcgatgttctgattgaataaatccacatttatataatatataaccaccaaaaatatcgcctctaaatcctaacccttggacatgttcatacatatattcttgcttttgactttttaagattacctttttcaattcagaacctttcaaacgtacacgaactaagttgattggatgaggtaacatagtatggatatcgtattcagtaagttgatcgccctcgatactattaacgattaatccagcattaataattgtacaatctgcatttgtaaactcatacacactttctgcaagtaaataagtcgtttttgtaatcacatttgttttactagataaagaaactggcttattaataatcgccttattcatcaaatcttttccttcttcatcaaaatgtgttttaacgactggtaatgtgtctactggatgtaatgtagcctctttagtaattactgttttattttcaatcgttaaattcacttctccaagataatatccatatttccctgctgctgccataagtacaccattattgacttcaccatgattaaaatgatgatgtgtgtggcttcctagtattacgtctatctctgggatttcttgacataatttttcatcaaaaaagacacctacatgactcataactattaatacatcgtattgtcctttgcgttgttcaatttcgtctttgatggcttctaatgggtctgtcacaatccaatcaagtgctcgatagaatggcgtgaaaggtgccgtggctgctacaaataaaaagcgcacattctctatttcttttatataagatgtggcaatatgacgaggtaagtggccatcttcgtctaaaacattagcacatatgactttaaattgtgcatcattgtaaagattgtttaatgcttcatgagaaatagtcattccttcattattcccaattgtagcaatatcacaatgagcctcatttaaaagttcaacattctttttgcccatagttgcttctgttactggtgtagataaatcaacatgatcaccaatatctaaataaagtgaagggtgttgaagttcaggtcggtgttcagccatgtacgtcataatacgtgcatattcattaaggtggctatgaatgtcatttgtatgaaaaattgtaagcttcacttaaattcctcctgtttttttatagaaacgatttaataattagatatacacccataattaacattactgtgcgtaataataatactactgtttctgatttaatcgagtgatttatttttactccaatttgagcgccaatataactagaaatgattagaataattgaatatgaccaagcaacatgaccttgaataatatgaccaattgaactcattacacttgaaaagaaaatcatcatcatgcttgtccctactgctacatgaggtggaaatctaaatactataagcattaaaggagtcatcaacgctccaccaccaatcccaaataaacctgtaagtacacctataaataatgtagcaaagaaggcaaacataggtggaacgctataatgatatgtcatccctttagcatcgatgtatgttttacgatacttttccttatcgaatattttaaatggtttaatcttatgtctaatcatcaataaaatagatacacagatcataaaaataccaaagtataaattaaacgaatttaatgttaaatatctgcttaaaaatgaaccaataagtgaaccgggtaataatccaaataaaaatatagagccatttttaatatctacttgctttgttttcaaataaccaacagatgaagaaagtccagttacaataagaataaccgatgacgtaccaattgcaatctgagtagtgatgccgtgtaacagatgatggttcactcctaaatacactaaagtaggtacgataattataccgccaccaatacctactaaagaacctaatactgcagataataatccaattaaaactaataaaatcattgttaaaaacattataattcgcctcttagaaaaattttaattgctgaggtgctaagcctgtatactctatatctaaaatatcttgataggttttagcattttgagctgcatgaccaccagaattattattaaaaatgacatagacctttttagctttttgttctaatatttgaactttattcgctaaatcttttaattcattttcattataattatataaatatctaacatctcgccactcttgatctgtcatatcttttttagtccaaccatgctgatttctaccatgataacgcacaaaagcagtactagaagttatacgattgactaacggtatagacccatctttaatttgtggttcatctacgaccgcatgaataatttgatgttcggttaaaaacattaaagtttgttctttaaattgggaattaaaccaagattgatgtctaaattctacacacatggggatatcttctagctgttgtcgaacatacaaaatataatttatattttgagctgtacaatcaaaccaaggtggaaattgcacaagtaccattgctaatttatgatgtgcaatcagtggttcaagcatgtgtctaaattgtttaaatagttcagatcgtgaatcagcataagttttataatctgagtgaagcgtcaatgcttgatgaatcttaacgataaactgaaacttatctggtgtttcattgatccatttcaatatattacgttcaggttggatagcataatatgaggcatcaagttcaacaacaggaaaatgactcgcatacgtacgtaatttatctgtttgtctttcaagatcttcatataaagaataatgatctccccatccagttagaccgatattaatcatttttatcaccagatatatgataccacattcaaaattaatatatcacttgttgtatactaactttacattttcttattactttaaaatcgtcactataacaccctaagtgcgcgttaataactgattaatttgtaaaaataattaatctattaaatcattcacttttgattagtagctaaccggggatccactccaattatgggtaaattcactatctccatttgtaactacttgtcttctaatagattgtattaactgattttgaactggataagatggaatatcgccctcataattaatcattacttgaacaaattgactactacttcgggcatacttaccacttctgaatccgtattacctactatattggcttgaataattggttatttaatagtttagtcaaacaatgatcacactattgcattataaacatcaatatttgacttatcacctgttctatatatattaaatgtttacttctttttaatatacttgaaaaacaaaagaactagaatgttaaacattctagttcttttaactattagcttaagctatatcttaaattatccaattgaaccttccatttcaaatttaataagacggttcatttctacagcatactccattggtaattctttagtaaatggttcgatgaatcccataacaatcatctctgttgcttcttcttcagaaatccctctactcattagatagaataattgttcttcagatactttagaaactttcgcttcatgttctaatgaaatattatcattaaatacttcattatatggaattgtgtctgaagttgattcgttatctagaattaatgtatcgcattcgatatttgaacgcgcacctttagctttgcgtccaaagtgaacgataccgcgatagattactttaccaccgtttttagaaattgatttagatacgatagttgaagatgtatttggggctttatgaatcattttagcacctgcatcttgaacttgacctttacccgcaaatgcgatggataatgtactacctttcgcaccttcacctaataatacacagttagggtatttcattgttaacttagaacctaagttaccgtcaacccattccatattaccattttcatgaacaaacgtacgtttagtaactaagttatacacattgttagcccagttttggatagtagtataacgaacatgtgcatctttatgaacaataatttcaactactgctgagtgtaatgaacttgtagtatatactggtgcagtacaaccctcaacatagtttactgaagccccttcatcagcaataattaatgtacgttcgaattgacccatattttctgagttaattcggaagtacgcttgtaatggtgtatctaatttaacgtttttaggtacatagatgaatgaaccacctgaccatactgctgaatttaatgctgcgaatttattatcagctgctggaacaacagaagcaaagtattctttaaataagtcttcattttcacgtaaagcactgtctgtatctttaaagattatccctttttcttctaattctttttccatattatgatatacaacttctgattcatattgtgcagaaacaccagctaaatatttttgttctgcttctggtatacctaatttatcaaatgtacgtttaatttcttcaggtacttcatcccaagaacgttcagtatgctctgaaggcttaacataataagtaatgtcatcaaaattcaactctgataaatcgccaccccattgaggcattgggattttatagaatagttttaaagcttttaatcggaaattaagcatccattctggttcttctttcatcttagaaatttctctaacaatattttctgttagaccacgttctgatctgaaaatggaaacatcctcatcatggaaaccatatttataatctccaacatcaggtgcttttttagccatttcaatcactccttaaatatatttaaaacgatatgcgcatcatttatctttcactactatctatagtcattgtaacaacatgcaaactatataaaaagaaatatgtgtaaaatgtcacagcaccatagtgcttagaataacatttattacctattcgtattttattcttcagttgtaccttctgctttaccttctttttgcactgtacctttttctaaagctttccacgctaacgttgcacatttaatacgcgctgggaattgagaaacgccttgtaatgcttctacatctcccatatcttcagtgatgttataatcttcacctaacatcattttagtaaattcttgactcatttgcattgcttcacctaatgaatgacctttaactgcttcagtcatcatcgatgcacttgacattgaaattgagcaaccttcaccttcgaatttcgcctcttgaatgataccatcttcgatatcaaatgttagtctaatgcgatcaccacaagtaggattattcatatctactgtcattgatccattatctaaaacgcctttattacgaggattcttataatgatccataattacagatctataaagttgatctaaattattaaaactcatatgagaaaaactccttcgtttgtttcaatgcttctactaattggtcaacatcttctttagtattataaatataaaaacttgctcttgcagtagatgatacatttaaccatttcattaatggttgcgcacagtgatgtccagctctaacagcgacaccttcagtatctactgctgtagcaacatcatgtggatgaatatcagctaaattaaaagtgatcacacctgcacgtctttctttagggggaccatatatttctaatccttcaattgaagataattgctcatatgcatattctgttaattctttttcatgctgatgaatggcatcaaagcctatattttcgatataacgaatagcttcagccaatccaatagcttgagcaataatcggtgtaccagcttcaaatttagtaggtaagtcagcccatgttgcatcgtacttacttacaaaatcaatcatgtccccaccatactcaacaggttccatgttttgaagtagttcacgttttccatataatacaccaataccagtcggtcctaacattttgtgaccgctaaagctaaagaaatcaacatctaaatcttgaacatcgatatccatatgaggtgcagattgtgctccatcaacactaataatagcaccgtgttcatgcgcaatcttagcaattgcttttatatcattaatggtacctaagacattagacacatgagtaatagctacaatcttagtattgtcattaattgtcgatttgacatcttcgattcttagttcaccatcatcagtcataggaataaattttaaagtagctttttttcgtttagctagctgttgccaaggcacaatattagcatgatgttccatctctgtcacaacgatttcgtcgccttcgttaatattagcatctccataactatgtgcaacaatattaattgaagcagtcgtacctctagtaaaaataatttcttcaaaatatttagcattaatgaaacgtcgtactgtctcacgagcactttcatatccatctgttgctaaagaacctagagtatgcacaccacgatgcacattagaattgtaacgtttataataatcatctaatacatttaatacttgcactggtgtttgacttgttgctgttgaatcaagataagctaatcgttttccattaactttttgatttagtataggaaagtcttcaataatttcttgtatgtttaatgaagtttcggccactaccttcacgacctttcttttattgaaaatctcaatgacttatttatttactttaagttcgatgacttctcgtaattgacgtttcacatcttcaattggtaattcacggacaactggatctaagaaaccatgaataacaagacgttctgcttctttttgagaaataccacggctcattaagtagtaaagttgttctgggtcaacacgaccaaccgaagctgcatgacctgcttcaacatcatcttcatcgataagtagaatagggttcgcatctccgcgagcatgctctgaaagcattaacacacgagattcttgatttgcgatagattttgtaccgccatgcttaatatatccaataccgttaaatacagatgaagcattttcacgcattacaccatgttttaagatataaccatttgtttccttaccatattgaacgattttagatgttaagttaattttttgatcaccagtaccaacaatgactgattttagttcacttgttgaacgatcaccaattaagttagtagtattatcaataatttggcttccctcattcattaaacctaaagcccaattaattgatgcatctgctgccgtcacaccacgacggataatgtgacctgtaaatcctttatctagatagtcaactgaaccataagtaatgtttgaatttgctcctgcaatcacttcagaaataatattgacttgattaccttcaccacttgcagttgaaaggtaattctcaacatatgttacttcagcactttcttccgttacaataatagcatgattaaataaacttgcattctcattatcatgtaatactacatattgaatagggtcttcaactactacatttttagggacatatacaaatacgccaccattcaataatgctgtatgcaaagcagttaatcgatgttcatctactgtaactgcatctttcattaaatatttttctactaattcactatgatcttgtagcgcttttgataaaccttcaataataacattattatgatttgcttgttctgatacttgtgtgaaagctaaatcattattatgttgaataattaaatttttagaattttctatatcaataatatttttaactgattcaggaagttctgatacatcattatatgatttactttctacatgatgttgtttaaatgcatcgaaatcccattttcttagttttgttttatctggtttaggcatttctaaagtttctgttaatttcaaagctttttgacgtagttcagtcatccaagaaggttcattttgtgctttagaataatcaacaagttgtgcttcagaaatatttaaagtttctgttgtcataatgctttttcctcctacttgatgaaaaattttagtaactgaattgatatataaactgtttatttccacattttaaaatcaatcagttctttttatgaatagtttttatattatttaatgacctattcagttgcaccaaattcttctttaacccattcataaccttcttcttcaagacgtttagctaattctggaccgcctgattttacaactttaccgccatacataacatgtactttatcaggagtaatatagtttaataaacgttgatagtgtgtaatcattaatgcaccgaaatcttcaccacgcatttcattgattcctttagaaacgacttttaatgcatcaatatctaaacctgagtcaatttcatctaaaatcgcaaatttgggttctaacatcattaattgtaagatttcattacgttttttctccccacctgagaaaccttcatttaaataacgttgcgccatatctttatcaatatctaagaaatccatttgtttatctaattttttaataaattgcattaagttaatttcttgaccttcttcacgttttgcattaatcgctgaacgcataaagtctgcatttgttacaccagtaatttctgatggatattgcattgctaagaaaagacctgcttttgctctttcgtcaacctctaattctaaaatatttacgccatcaagtaatacttcaccttgagtgacttcataacttgggtgacccataattgcagaagataatgttgatttacctgtaccattaggtcccatgattgcgtgaacttcaccagtattaattgttaaattaacaccttttaaaatttctttatcttcaatagacacatgtaagtctttaatttccaatgttgatgacatttatattccctccataaaatataaagttttcttaactagtttatagtaattttaatttatagtcaaaaagacttctaacactttaatacacttaattataacgtaaatagtccccaatataaacttattaaaatgacaaaaaagattatattttcatcaaaattgtttcgaaatgacttcaattttcaagtgcgactgataatcaaaaggcatctgttctcaataggcatctatatattaacgatgattgactacttaatatttcaatgtaagttaaaaatttggtagtattcgtattaacttaataaagaaaggagacctttatgacattcaaatggaaaaatattttaaaaggatttgcgatgggaacttcagatttagttccaggaattagtggaggtaccattgctttacttttaggaatatatgatggttttatttcatccattagtggattattttctaaacgattttggccaagtctaaaatttttacttcctatattaataggaatgattttagcgattggtgtacttagtaatttaattcattacctactcgatcatcatcacgtaataacgatgttcttttttactggtttaattataggcattgtcccttacttattaaaaacttcagattttaaaaaaacatttacaactaaacactatggattattaattttaggaatcatagttatagtgacattaacgttattaaatcctagcacacagcaatcaagtttaacacttcaattatcttttagtcttattattaaatattttatagcaggtgtttgtgcttctagtgcaatgctacttccaggtatctctggctcatttatgctacttgtattcggtgcatatggaacaataatgttagctattgctaatttagctaaatttaactttaccggtctgcctatattaatagtagttggtttaggtattttatgtggatttctattttcaagccgtattataaaatactttttaacccaccactttattggaacatttgccttaattactggttttgttattggttcaatttatgctgtattcccaggaattcctaaatcaccagtagaatggattgtttcgattatttctttagtaataggatatatagtaagttattcattaggactgattacgtctaacaatgatactcagacataatattctaaaataaacaaaaaacgcatgtgtttaacacatgcgttctcttctagttaaaacgacttatttatcgccttttaatttatcaataacatcattcgctttatctttaacgttatcaaccacttctttagctttacctgaagctttgtcgccttgaccttctttttctaaatctttattatcagttgcattaccaactgtttctttaatgttacctttagcttgttcaaatttatcttctgccattttaaattcctccttgttgaacatttcattcttaaatgatttttgtaatattaacatacccaatacatatcatgtataaacataaattctgttgttttttatattttctgtctaattaaaataattgttataataacattgttcaatttacttatccaattggagatgataactatgacatttgttaattttactgctatgacagaaaaaggtttaaataaaaaggttaatgcattcttagaagaacatccatatatagaaattgttaaatttgaatatgcgatgggtcaaggtggtatcggcgttggaatactatatcaagacgattcaagtttataatataaatgactgcaataaatgtattgatataaaataaaaaaacggttcacatatttctttgtgaaccgttttttactgcatattattcattattttgcaggtacaactgcacctttgtatttttcattgatgaaatcacgaatgtctttagattgtaatacttcaactaaagctttaattttttcatcatctttatgatctttacgaactgcaattaggtttgcataagggttattattaggtttttcaactacaattgaatctttttgtggacttaagccttgatcaatagcatagtttgaattaataatagctgcatctacatcttgattttgataaattttcggaagatattcagctgattgtttgttattgaatttaatatcttttttgttttcagtaatatcttcaaatttagcgtcttcaatttttacgccttttttaattttaattaagccttcatcaacgaagaattttaagaaacgaccttgttcagctgggttatttgaaacataaactgtcgcacctttaggaaggtcttttaaacttttgtattttttagaataaacagccattggttctaaatgaactttacctgcatcttcaattttgtatcctttttctttactttcagtttttaaataaggaacgtgttggaagtagttagcatcaagttcacctttatctaacaacttattaggtgtagtgtaatcattgattgttttaatttctaaatcataaccctttttctcaagaagtggttttgctttttctaagatttcagcgtgtggtgctggtgaggcacctacaacgatttttttatctttttcgtctccacctttaccacaagcaactaatacaactgtcagtgtaagtactaatactaaacttaaaagttttttcatttaatctgtcctcttttctattatcgtttatcaattttatttgtaagccaatccccgatgaattggattataaatacaataattaaaataaatacggttgacactaaaatgacgtcgttttggttacgtgtaaaaccagttaagtaagctaaattacctaaaccacctgcaccaataacgcctgcaatagcagttgaaccaactaaagcgatagcagttactgtaatacctgaaacaagtgctggcattgcttctggaagcaatacttttcgaacgactgtccaagtattcgcacccatagaccatgctgcttcaataacgcctttatcgatttctttaaatgcgatttcaactaatcttgcgtagaacggtgcagcgccaatgattaatgctggaagtgctcccgtcggtccactaattgtacctaataatacacttgtgaacggaattaataacaaaattaaaataataaatggaattgcacggaacaagttaactataaatgaaactaccgtatagaaaattttagctccaggtgcgtcacttttagctgataagaaaagcagcacacctaagattaagccaaagataaaagcaaaaatggttgacactatagtcatataaagtgtttcatatattgcttgccaaacttcaggccattgcacgttaggcatagtaatcatttcatggaagatatcaccatatgatttatccatgtttaatcacctccacatttacgtgttgtttatgtaactcagttacaaatgtattaaatccatcttcactaatatgtggaatgtgtacaattaaaaatccaactgaacctgtacgtgtatttttaatatttgcttccaaaatgtttaattcaatcttctgcgttcgcgtaatttcagacacaacaggttgcgttgtattattaccgttgaaattcaatcttacaatatatgcgtctttgttcaatggttctagatgtttaattgaatcttcaaaatcgtcgtctaaatcgtctttcacgaatcgttttgtcacctcatgttgaggattttcaaatacttcatcaacattaccttgctcaataacacgtccattttccatcactgcaactgcatcacatatgcgtctaatcacttgcatttcatgtgtaataatcacaatcgttagatttctttcttcttttatttttaacagtaaatctaaaatttcatccgttgtttgtggatctagcgcacttgtagcctcgtcacataataagacattcggatcattcgctaatgcacgagcaatcccaactctttgtttttgaccacccgataattctgaaggataagctttttcacggccttttaaaccgaccaactctacaagttctaaagctcttttttttgcttctgtacgagctactccagctatttctagtgggaacataatattactaatgacagtacgtgaccataataaattaaaatgttggaaaatcatacttactttttgtcgtttttttctcaaatctgatttagaaagtttgttaatattgtctccatctataataatatcccctgaagtcggctcttctagattattaaacattcgaattaacgtacttttaccagcaccagagaacccaatcactccaaaaattgagcctgattctatattcaaatcaacgtgatctactgctagtacatctttgttctttgtgtgatagcgtttaacaacttgatttaactcaatcacgttaaatgcctcccttaaattccttatgtaattaaaaaatgctttcccacctagagagatgagaaagcatttaaaattatctttctctcatcttctaaagtcttaaactttatgtgaattggcaccatttccattatagacggttgccgggcttcgtagggcacatccctccacctctctcgataagagttttcgcactatttaattaatttatatcctatcactgtactaataattcgtcaatcatttttttaacttttctaacaaatatggcacggattgaaatgcatagattctatctacctctttatccttatccataattaacagtacaggtacagacataattttatattcttcactaaaatacttatggaaatttaaatcaatttttttaagtggtaattgttcgatatcatttgcaatatctagcatgcgctctgaaatcttacatgttccacacataggagtatatccaaatattaaatgtttatctttatcaaagtgttctttgatgtcttcgattttaatagaattattcattcacgagtactaacctttcagaacttaaattaggtataagttttttctctttttttacgttaaatccatatttactcaatacatgagcaagataatttttaggacaacgcgcgacttcacaatatgttttatctacatagatatgttcactttcacttaaataacgtttaaaccattttctaattttttcgccttcatcatctgaatcggcaagaatatagacctgttttccatataatgtttctatcatatcgtctagtttgtcgatactcattgtaccatgtgtacaaataatatttacaggttcagctatgacttgttgcactttcttcttatcagatttaccttcaacaatgataactttgtttaaaattgccatgttcatccaccttctaagtcgatattaaacaatcatttactttttcacgttattgatgaatataaacacaatttacagataattaatataatatataaaaaactcctagattcaatatcaaggagttttttaaaattattcgccaatcatttcagaatattgttcagctgatagcaattcatctaattgactttcatcatttaattcaacttttaccatccacgctttttcataaggtgattcattaacaaattctggactatcttctaattcgtcatttgtttcaacaattttaccagagacaggtgcatacaattcagatactgtctttactgattcaacactaccaaatgtatccccttcattaatttcatcatcgacatctggtaattcgacaaatacgatgtctcctaattcgccttgcgcgtattcagtaataccaattgttgccgtatttccttcaactttaacccattcatgttccttagaatatttgaattcgctcggtactgccacgaaaatcccctcctaaaaataattataatttaatgatgccataccgtaagttttcattcaactattaatattaaaagttgtgattatactttctataaccatacatctttatattgttcttcattaaaacctaatgtaactttttcacctgaaaccgctagcggacgttttaccaacattccatctgaggctaagagttctaatttttcatcattagataattcttttaatttatctttcaaaccaagttctctatatttcacaccatgtgtattaaagaatttatttatttccacttctgatttaactactaactctttgaattcttgttttgtaggtgtgtgttgcacaatatctatagactcataactcactccatgctcatctaaaaatcgagcagcttttttacaagttgtgcattttggatattgataaaatttaatcattcagtattatcctcctatttaaacttattataaatatatcaaattatttaaataaacgctctactttttaagctttatttttttctaaatattagtaattagttataatatataaaacaagctaaaaggagtgtaaagtatgaaaaatattactactactgaagaatttaattcagttattcaaagtgaacaacctgtaattgtaaaatttgaagctggttggtgtcctgattgtaaagcaatggatatgtggattgatccaatcgttgacaagtataacgactataaatggtattctgtaaatcgtgatgaattagaagatgtagcatcagacaatgaagtcatgggtatcccaagtttacttatatttgaaaatggtcaaaaacaagctcatttgcattctgctaatgcaaaatcacctgaacaagttgaatcattcttaaaagaaacatttaataaataattaaagaaccacactcgttattttgagtgtggtttctttagtattctgagattaaatgtttatttttacgttttgctttaggtggtacctcttctaaatcagtaagatacaataaacctgcaatagcttcatctttagcaataccaaacgcttttcttacttttggttcaaagatgtacaatggcgttttccaacatgtaccaatacctttttcataaagtaataacattagattctgagtgtatgcacccatcgcaaaaaagttttcgcgattttgtcgttgtcgtgggtcagttttaagtactaaaactaacatacctcctaaatttgtcaccgcgttataatgatcttcttgtttttctggactatttggaaaggcaaaacgtgtaatatctctactcatatctcctaatctatctttagaaacatgaataactctccacggttctctcataccatgattaggagcgtcagtagcttgttctatggctttaaatacatcttcatcattaatcaccatatcatgtttaaatttctttatacttcttcttaaagaaattacttcttgtaattccacaattatcgctcctctatattgataactattatcaattatacgcggatatcgatgacatttcaatgtatactacatgctttcgtaaaataataattgtttttttagttctttaacatgaatctgccctggcgcttgaggttcacctaagcaaccatatgacactgtacccccaaaaacaccttgagcagttcggctcactaatcctaaatgagacatagatattccaataacttgttgagaaatcgctttagatgtataagctactgcttctaatagcattgctacgtcctgtttttccttaggcattactgcaatttttacatactcaggatttaatttttgcattttataatatgtgaattttaattcttctaacggtggcgtttctaaaaaattatgataggacacaattatttgtttctgatgacgatgtgcattttctataatacgcttatgcgtctcaacctcaatatttgactcccattctatatctatcatttgacattcatctattgaggaaattgtttcaattaactgtaaatattctttattagttaactgaccttttccaccttgagaaattgtgcgatatgtcaccaatattttgaaatgattctttatttcatttagaagtgaaaggtttttcattaaaagttcgtgatgatgactctcccactgatctatacgcaactcaatgatatctatatatgcatgattatcattgatactatttaacgtttcattatctattatatcttgaggtgctatggttgcagctacctttacttctgccatataatcccttcttttcttgccatttacaattttatattattttaaactatttatgtcacactcgccaatgtttaaaattctttttaatttttacagatcatgatttaaaactttttagttgggtatataataattgtattcgaatttaggaggtaataataatggcagttcaatatgaaactaaagcaacaaacgttggtggacgtaaaggacacgtacacacagacgataatgcaataaatgtagatgtattaccaccacaacaagcagatggaaacgcaactaaccctgaacaattattcgcagctggctatgcttcatgcttcaatggtgcatatgaccttattttaaaacaaaacaaagttcgcggagcagaacctgaggtaactttaactgtacgattagaagatgatccaaatgctgaaagtccaaaattaagcgtatctattgatgcaaaagttaaaaatgtattatctcaagaagacgctgaaaaatatctacaagatgctcacgaattctgtccatattcaaaagcaactcgtggcaacatcgatgtagatttaaatgttcaagttgttgactaattagcattactctttaaaatcaaaattttataattttaaaaaaccctgagacacctcattatgtctcaggatttttttatgtgttgatagataaagactgaattaaaaagagctgatatcaagttatttcaatagtagtatgaaagttaacataatgactttcaataagaacatttacgtccttggggatgtattgctagaattgaacgacaaattcaaattgaattccgtcccactccatttcatttcctatctaacaattaagtttaaagatatcgatgtatgatagataatattctaacgtctatgtattctcacactttttgtataatttttaaaaataggctattctatggatatagttattaattaaactttataaaatttttataattcaattaatttgtataaatagatttttaaatgctaataataatttgaggtgagtataatgtcagaagttagaattcttactaacaacgatttaaatcaatatattactttaatatcaaatgattcacatacttattcatgggataaactttattttcaacatgtgtctccaaattacttaaaacacattctatctaaagaagaagagtattgtaatatttttggcaattttaaaaatgaaaaacttgtggctggtgttacattgcgacaactcaaacaagtgggcacacaacataaagcaatgttagaaaatctctttttaaaagacaaaaaagacgagattactttgcaaaatttaatctgtgaagtgattaattatgcaaagtctcgtcatattgaaaaactaatgacttgtattacctcaaatcatattggtgcaaagatttttttcactgcacttggttttgaaactttagggattgaaaaaaactcatttaaagtagatgatacttattttgatgttcattggctactctatgatattaaatagtcaggataatgattttacttattggcatcatcgattgtaggatccaccatatcgagaaattcaaactttccatgtgtataaataaattttaaaatacaacaatttccaatgatatattgatttgccatatcatcacctatccattttcttaaaaaaacctgaatggctgtaccatggcttaccgctaagaatgtttttccattagaggactctaataaattacttaatgtcgtaacgatacgatgttcaacttcatgtttcgtttctcctccgaaagagcgtagtctagttccaaaaatgtcgtgtttatcccaaactgcatccaataattgaacactatccccttcaaatagtccaaaactccattcttttaatcctttattacgttgatatgcttgttcaggtaaaacattttctaacgtatcacatgcccgttccgaactagatgaatatgcttcgtcaaaagtaatatgattatgtttaaagtaatgacctgcttgcttcgcttgagatattcctaattcagtaagtggagaatcacttgcaccttgtactttccctcttaaattaaacatagtttgtccatgtctcattaaatagagtattttactcattacattcacctcaatatattttttaaataatataggcaactttcttttacaccactttataatccatacatagtatatcttaattttttttatacttaaaaataaataaaggtaaaaaattaattaatacacgtttggttctcattgtgatgggtataatgaattataagttttacaaataaaggagcgttcattgtgaatgatcatcatcaatacaattatgtcaatcctaataagctctcattagattgggaatgttttgtaataagtaaatcagaaatgttacttgatggagttcctagtgaacttattcattcgtggttagatagagaaattatagaacctttttcaattagagataatgaattaaactttaaaactaaagatatatggaatgcgttaaagcaacaaaattggtactatcctaattcaaattaatttatagagactcattgctcgattagcgctttcaattagttggtgatcaacgtaatttgacatcacatatgctctaatttctttattattgcgttcgtttttgggaaatttatgatcatttacaatgtagtttgctaaacttcctagtggtgtatcgtcattaataaatccaataacaaaatcataaaatgtcatttttttcctcctcacattacaacatttcagtatctcctatcatcttattgtttctaaatgaatgatgtttatttatatataatcacatcagtaagttatattttttataagagttgtaatgttttaattgattttattaaaataattaaaacactttatttctaattattcactaaaaacattctatgcgaatattaattttctgtaaatgtgacgatttttcgaatctttatactcttttatttacttttttgatttccccttttaattgatacgtttattagttaatcatacatatttatgactgccgatgagtacattttagtttaatcgccggtttttttatgtaaatttacgaagtcattcttttaataaggattaaagttttacctttcttttaaagaagtgatatgatgataaaaaagacatcattgttatagaggtgacactacctatgaatattaataaattattttggattaatattatgattacccttttatttctaggttttaacattattgtcacctattttcctaagttagatgattatttctggctcatacctggtttaatcatatgtggtctcactatttcattcagtttaattgccgctatcttggataaaaaccttataagcgaaataatttttttaactaatctaatcatttttttatattatatatatccactgatatataactttttttaattaaaatgtgggaggtttacaaatgagtacacatttaacgattttactttggctgggtattatatttgttgttgctgcttcaattatattagggttattgctaaaatccaaaaaagaagaacgtaaagaatcatatttaggctttacagtcatcttctatatttttggttttgctttactgatatatatactattatttggtattttataaataggatttaaaagaacaaaatacgattttattttgttcttttttatatgtttctctataaaacgattaaggagatataaattgaagattattcaattgaaacgtattatatttgtgattttcattttattactatttttcgcgttctcttctcatacttatgcatctataagttccacttcttcatcttcagaaaaaggaaatgatttcaaattacaacctggtgatattattcttacaaaaggtccggtattatttggtttctttggacattcaagtattgctttagatcatgatactgttttacaaattgaaggacccggcgataagcctattactgaatctttcgaatcatttaaacagcgatttggcgttaaaaaaaatgattggattaaaatatatcgttgtgagtatcctaatgcaggtcaaaaagcagctaattgggcaaaatctcattataaaaatagtgataaaacttatttagttacacttaatttaaaaagtgaacgctttacatattgtactaaaattatctatcaagcatataaatacggtgtaagtaaagatacgataaatgatcatggtttactgattatctctccgtatgctttagttgataattttaataatgactatcgccttaagctagtcaaaaaatactaatagttaaagaatgtggcgttacactatacttttctatactaagaaatgatatttaaaggaccaacttatttttatgaaaaacaaaaaattacattatcgatttttttattatatgtttttaactcttattattatattatttattcttctctttctttacttttataaacattttgaattaaaacaaaatcaatccttagattactatgctaactttaatgatttaaaacaacatacaacaaaaaataaagattggaaaataatcacaaaacaccgtaagcacagcgataccttaattacagctattcatggtggaagtattgaacctggaaccactgaactcgctcgtcgtatttcaaatattggtcaatataatttttattcatttgaaggtctacgttcagataataatgctcaactacatattacttctactgtttttgatgaacctcaattattagatatgctcaaccattcgtcaaaaacaatatctattcacggatatgcaggcgatgaacccattgtttacgtaggtggtaaagataaaaaattagttcaaacattacgtcattcattaactcatcatggatttacagtacaaaaaacgcctaaaggaattgaggccctttcctataataatattattaatagagataaaaaagatacaggagtgcaactggaattgacgacccgccagcgagctttgttttttaaacataataaattggataaaaataatagacgatattcaaaaaattatacgagaacattttataaatttgccgaagcagtagatcaaggtattaaaaaagcgcaataaatgtaatatcgtttttttagttttttaattaaattaatttgggtatatataagtaatgagtttaggaggcgtttctatggacgagttaactaaagaacaaaaatatacagtagcaaaattttataagctatatatggaacgttcaaatagtggacaaacagaggaagaagcaaataattttaaagatagtattacagctcaagatgattatttttgcgatagaaaatatagtgatttcttagaaaattgcaaagttcttattgatcatggctatctagatggaaatattatgtctgatagaattgataatattaaagttacaaataaagcttttactgaaattgaacaaagctttaattaagaatatctaattttttcaagttatttctattcaagaatatttgcttaaaagtcttaaataaatatatttatttaattatgaatataacttttaaagcctgcacatatgtattgagtatgtttcaggctttttatttttaatagaggtgagtttacatgaatcattggaaaattaataatatgacgaatagaaatctacttatacaacaaaacgaaaatgatgtatctatagttgaacctttaaataacagttcatttaaaattctatcagagtttaaactgaatacaccctctcttcctattaatacatatgatgaacatttatatgtttcaatcaattttaaaaatgaagaaattaatatttacaataaatcgaatgaataacactattatattaataattttatcaactaaattgttttaaaaaaataataaaatgttaaataaatattaatatttattatgtaatatttatagtgaaatttgattgacatattgtaatgatggaggtcagttatggataaaattatattctatctaggcattactttatttttaatcgcttgtatagtcattatttttggtattattgctatttttaaaaataaaaattacttaaaaatgcttgctatggctattattattatcttattaagtatgcttgcactgggtattcataaagtcattgagagtaataatccctctaaaagtgacatcactcctataaaaaaagaaaagcctaaagataataaaacaaataaagaaaataacaataaaaaagaaaataattctaagaaaaataataaggatacatcacatgagtctattcaggatactccttccactcaagaaaacacacccgccacagaagaaaattcaattcagtcatcagaatcaccaactacacaacaatcaatacaacaagaaaacccaactactgaacaaaataatgcgactacaaataatcaaaattctacacaacgacagcaagaaccttcaacacaacaacaagacacatctcaatatcagacgaattcagcaaataatgattcaaaacaaacacattctactcacaaccagaatagtcaaaatagtactcaatataatcatacaaatgaatctaatacaacaaaagacaacactaataatgtaaatcaaaatagcacattaaatacaactcaaaatacacaaagtaataatacgaataataatataaaccaaataaacaattaataataaaaaaggtagagctttgaggctctatcttttatttttgacatcattttaaaatttataaatatttattgaatattacatttaatatgccatactaaaatatgatacgacttaaaacaaagggatgagacaatgaaaaaattagccttactaacgctttcaagctttctaatattaggtgcatgtagtcatagtaatgatacagtcaaagatgtaaacgaaagtgcacataaaaagaataatccaaaagcacacaaatccaaaggcaattctgaacgcatagatagtaaaaaaataaataaaaactaaaaataaggagtagaagcgctcttactatccatcgcttctactcctatttaattatcattcttcgtattgtttaaagtaatcttcgtctaaatggttaagatgaatattttcaatttgtagtgtaacatgttctaaattatatttttctttcaacaattcagaaactttattaaccgttgaatacggccatttagtatattcatcacttaaaacaacatgagcactcaatgaactatggtttgtagtgatgctccataaatgaaactcatgcacatctataacgccttcaacgcttttcattgcattaataatttcatctgaatcatatccatctggaatacgctccattaatactttccaagcatttttaattattttataaccaccatttaaaatgataagagaaatgatgatactaatgattggatcaataattgcccatccagtaaaatgaataagtactactgctacgataacgccaattgaatttaataaatctccgaaaaaatgccataatgcactttgaatattgacattatcttcttttcttaaagatctaaataaaataagtgttaaaatgatatttataataagacctaatacagctacaaatatcataataccacttgctaccggttcaggatgtatgattctcaaaatgccttcgtacataatacctaacgaaataacaattaatgctaaaccatttaagaaagctacaataatttctaatcttaaaaatccatacgtataatgtttcgttggaggcttacttgcaaaataaatagcaagcatagacaaccctagtgccaaaacatcacttaacatatggaatgaatctgataataaagcaagtgaattagcatataatccacctacaaactctacaattgtaaaaatcagcgtaataatcaaagaagaccaaagcgttgcttttgaactactttgaaatttcctatgttctacatgatgaaaatattttgattgattgttcattacttctctccaaacaattaaattataaactattttctttaaaactaccctaatatatattaaaaaaacctgcaaccaataaggttacaagctataagatggaggcggcgggattcgaacccgcgtccagaggtcctgatacaaatttttctacgtgtgtagtctattgattcatttcgcatattggtaagcaacagacaaccaacaatatgctagtttgattaaatttcatctaaacagacttcaaacggcagtgtttagcatatcctattagggttgaatcgcgttaacagcacataggaaatgctgttaggcgatgcagagtgctattacgcagctactgctaaattattgtttgatttgtcagttatatttaaccgaatgtgttgatgacggagacaaccctccgacacgcttaataagctcgggggacccctgtcgaatccaaaaacgcccccgcaatataataaaatataagatacagtttaatttaaacaactttacttatcataacaaatagagcccgattaagcaacaattatgcttaataacgggctttcattgcacgatcaacgtctcgtttcattgctttatctttcaatgcttgacgtttatcatgcagttttttaccacgagctatgcctaataaaactttacattgtccatgttttaaatacaattttaaaggaataatcgaatatccaatttctcttgtacgttcgcctagtttgataatctcttttttatgcaataacaactttcttgaccgtaatggatcatgattaaaacgatttccttcttcgtatggagcaatatgcatattattaatgtacatttctccacgcttcacttgtgcataactatcttttaagttcgcactaccacgtcgaatcgatttaatttctgtaccttgaagcacaatgcctgcttcaatggtatcttcaatattataatcatgtcttgctttacggttttcagccaatgtacctggtgattttgtttttttcttggccattaatgtatgtcacctctttgctgattattttttcttacgacgcgcttttttcttaatatgtttatctttataaaaaggtttatgcttagttgagctttgtttatcacgttgacgttgatttttacccttacgttgtttacgctttttctttttgtttttttgaagattatctttagatttatctaaagatttaccacgtgttttagcttgaatcgtttttccacgagcaggacgctgtgatttatcctttttaggtaatggcatgccaacaatttggaaatctatcatgcgttcatctacgtctacatgagtaactttaactgttacctcatcaccaattctaaacactttagcatgtcgttcacctatcaatgccatttgtcgttcatcaaattgataataatcatctgtcatattagaaatatgaaccataccttctatcgtatttggtaattcaatgaacataccaaaattggcaacagagcttacaataccttcaaattcatcgccaatatgttgaatcatatactctgctttcttcaactcatctgtatctctttctgcttcaattgcacgacgttcacgttgagatgtatgttctgctaattctggtaatgtttcttcccattgatgcatctctttatgattcatagagtgatcgacaagatacttacgaattaagcgatggacagttaaatctggataacgacgaatcggagaagtaaaatgtgtataatattctgctgacaagccaaaatgacctaaattcgtatcatcataatgtgcttgttgcattgaacgtaacatcattgttgaaataaccatttgctcagaacgaccttcaacttcttcttggatagattgtaatgttgaaggatgaatatcttcgcctgtgcctttaaccataataccaaaattagtaataaagtcgaagaactggcgtaatcgatctgattttggttgttcatgaacacgataaataaatggcacttctaatttgttaaaatgttcagcaactgtttcattggctgctaacataaatgattcaattaaacgctctccttcaccacgttctcgcaatattacatctgtaggtaggccttcttgattgaccaatactttagcttcattaatatcaaaatcaatttcaccacgacgtttacgcatacggacaagtcgattagataaatcttgtgctaaatctaacattggaacaatttcactgtattgttgacgcacttctgtatttttttcggtaataatttgattcactgcatcatacgtcatacgatagtttgaatgaataacactatcaaatatgtcatgattcaccacttcgccacgctcatttatttccatacgacaacttaacgttaaacgatctacttcgggatttaatgaacagataccattacttaaacggtgtggaatcattggaataacacggtctactaaatatacactcgttgctctatcataagcttctttatctagcgcagagccttcttttacgtaataacttacgtctgcaatacttactgtcaattccgtatgtccattatctagacgtttaacgctaattgcatcgtctaaatctttagcatctgcaccatctattgtaattgtaagatcgtttcttaaatctcttcgtcctttaatttcttcgggttttatttcttcagggactgattccgcttcttttaatacctcatcaggaaattcaatctcaattccatgctgatatataattgaaagaatatctactcctggatcatttttatgacctagaatagcagaaacatgtccttctggattatctgtgccatcagcatattttgtgatttggacaagtactttatgaccatctacggctccaagactctgtcctttaggtataaatatatcttgcataatacgtttatcatcaggaatgacaaaaccaaaatgttttgcttcactatacgtacctaccacttgtgtgacagaatgtttttctatagattttacttcaccttcaacttttccacgatgctctcctctggatttttgtaattcaactattactgtatctccatctaaagcacggttaatctttgttggtggaataaaaatatcttcaaattcttcgttttctgggcgtaaaaaagcaaagccttttttattttgacttaaagtacctcttattaattttgaacttaaattcttatttgatgctttacgttgatagcgatctgtctttgttcgctctaccaatcctacttgttcaagttcaacgagcacctttattaattctctaaatgagtcggcactactaagacctaaagcatcttgaaagtctgatacagacatcggttcataatcaggttgttttacaatttcttcaatggattgctttaaattcatcatgcccctcctttctttaatcaattatttttatgatttattcagaccagtctaatccttctaaaaactcatatacatcttcaaacacttgttctttttctttatcaattgtaatgacatgtcctgaatttgcataccatttaatttgtttttcatctgaatctacattttcatatatataatttgctgactgaggatcaatcatttcatctttttcagcttgaactactaatataggatctaagacttcatctacatcattacgcacacgacttaacgtatcactaagttctttgagtgtttcagtaggatgaaaatcttccatttctttatcaatcgttgcttgatctttaccttcatactttttaaaattacgtgcatattctaaaaaaccttcatagattgtaccttctgtttttacttcggcaggtgcacacattgttatgataccttttacaggacggtttaaacttaacttcaatgcaaatacaccgcctaatgacaatccagctaccgctatatcttcataaccttgttctacaagataatcatagccatcaagtacatctttaaaccatacatatggactagattttaatatctcttctggtggcgcagcatgcccttcatactgtggtgcataggaagtataaccctttttttgtaaaaatctaccaagttgtcttacatcagatgaattaccggtgaatccatgtaagagtaagactgctcttttaccttcttggaaaaagaaaggttgaggtaacttaatttgcattttttatccctctctaacaaaaattataatatgattacttttttattttgtactaatagattgtattcattatataatcaatctattttattcccttaatagcttaaaaatatgcattgatgatcatattaaaataatgatttcattataaaatgtgttaactctattataaataaaaaagcccgacattgatatcgtcggaccttataaaccaaaataacttattccaatcattattaaaaagaaaatgatggctaacacaattgttaatctatgcaagaataaatcgacgccacgttgtttttgcttaccaaataactgttcagcgcccccactaatcgcacccgaaagtccattacttttactttcttggagtaatacaacagtaattaatgcaatacaatcaataattaataagaccataaataatgtatgcatgaaaattgtcctccgttcattatatacgttccgaattataacatattcttaatatagttatcaaatactatcgattaaatgtacttttacgtacaattgaaataattaacatatatattgctaatattgctgaaccaatcacgacgattaaaataggtaaaataaataaaatagattttgtttcaataatagcatttaacaccatcgttaagttgacaagtgtaaataatacatttgatacatatacggcaaacataaaccaccaaagatatttatgtcgattccataaagcaattactccagctaaatatgcgagaatatacataatacctgtatatctaaaactatttaaaatgttatctactgcactgcttgatgcttcttgatgtgctagtgttaacagtgttttagcagtgtgagcatctaaagcaataaaattatggataattaataatatacaaaatacaagcgaactatatccaatccattgaccggcaatacgttctcttttatttgactgattaagttgttgatccatcttcaattctccttctttcaattacaggattattatatcagtttcatcaatgaagttaaatcttacacttcgaggctattatttaaaattttatattaaaaaaagcctgtcatagtctcaactctatgacaggcaaacgcgtgaactctattaattttagtatgttactaaaattatttatctaaattgtagaaagatttaattccgtcaaattttgctgtttcaaataattcatcttcaatacgtagtaattgattatatttcgcaatacgatctgttcttgataatgaaccagttttaatttgaccagcatttgttgctactgcgatatcagcaattgttgtatcttcagtttcaccagaacggtgagatactaccgcagtgtaaccagctttttgagccatttcaatagcatcaaatgtttcagttaatgtaccaatttggtttactttgattaagattgagttaccaataccttgttcaatacctctagaaagaatttcagtattagttacgaataaatcgtcacctactaattgaactttgtcaccgatacgatcagttaattgtttccaaccgtcccagtcattttcatccataccatcttcaattgtaatgattggatatttactaattaattcttctaagtagtcaacttgttcagctgcactacgtttcgcaccatgttcaccttcgaatttagtgtagtcatatacaccattttcatagaattcagatgacgcacagtcaaatcctaagaatacatcttcgcctggtttgtaaccagctttttcaatcgctttaatgattgtttcaactgcatcttcagtaccgtcaaatcttggagcaaaaccaccttcgtcacctacagcagtttctaatccgcgttcacttaaaattgattttaagttatggaaaatttcagcaccccaacgtaatgcttctttaaatgattcagcaccagttggtaaaatcatgaattcttggaatgcaattggtgcatctgagtgagaaccaccgttaacaatattcatcattggcactggtaattgtttaccgttaaatccaccgaaatatttgtataatggttgacctaataagtcagcagctgcacgtgcaacggcaatagacacacctaaaatagcgtttgcacctaatttacctttgttaggtgttccgtctaattgaatcatcattttatcaattgatacttgatctaaaactgaaaattcaccttcaacgatttctggagcgataatttcgtttacattttcaacagcttttgtaacacctttaccgctataacgtgatttatctccatcacgtaattcaactgcttcgtgttcaccagtagaagcacctgaaggtactaaagcacgaccaaaagcaccactttcagttaatacttcaacttcaactgttgggttaccacgtgaatctaatacttcgcgagcataaacatctgtaataattggcataataaataatctcctttaaatttagattccttaattattataactattttttgttatttaataaaatatttatactaagatgacttaatattaaagaataatattaaatcatcttagtatttacaactttactaatgcttaattaaagattcacctgtcatgtctgacggttgttcaacatttaataagtctagtaatgtaggtgctaagtcacctaaacgaccagtttcacgtaatgttacatcttctttagtaacaattactggaactgggtttgtagtatgagtagtcataggttgatcatcatcagttaaaacttgatctgagttaccatggtcagctgtaattattgcatagccattcatatctaaaattttatcaaccacttcacctaaacattcatctactgcttcaattgctttgattgttggttcaagcataccactatgacctaccatgtcagggttagcaaagtttaaaataattaaatctaaatcacctttgtctaactcttctaacaatgtatctttaacttcgtatgcactcatttcaggttttaaatcatacgtagcaactttaggtgaatcgattaagcgacgacgttcaccttcaaattcttcattacgtccaccactcatgaaataagtaacatgtgggtatttttcagtttctgcaatacgtaattgttttaaattattattttgagcaacttcaccaattgtattagttaaatcaactttttcaaatacgacttctgcatcaacattatcattatatttagtaaatgttgcatagaataaatcatttacacgctcaactttaaagccgtcaaatgctttatttgtaaatatttcagataattgtgctgctctatcaggacggaaattgaagaagataacagcatcaccatcttgaacaccttcattttgtccttcaactatgaaaggttcaacaaattcgtctgtaacgtcattttcataattcgcttctacaccttctttagcgctcgcataagaaggtccttcgaaattgcgaatagcattataagctttttcttcacgatcccaacgtttatcacgatccatagcgtaataacgacctgaaatcgatgcaaattgacctacaccaagttctttaaatttagcttctgtttcttcaatatatttaattgctgatttttgatctacatcacgaccatctaaaaatgcatgtacatacactttatctaaacctttttgtttagcaagttctaataatgcaaataaatgtttgtaatgactgtgaacaccgccatctgaaagtaaaccaaatacatgtaatgctgagtcgtgatctttaacgtgttgagctgctttacctaacacttcattttcgtagaaatcaccatcttcaatggatttattaatacgagttaaactttgatagacaatacgacctgcacctatattcatatgacctacttcagagttacccatttgaccttcgggaaggccaacatctaaaccacttgcttcaatttgagtcgtaggatatgtgttgtaataacgatcgaaattgggtttatgcgcttgttttactgcattaccatgttcactttcacggttagcaaaaccgtctaaaataattaatgctgttggttgtttagccataattatttagcaccttctaacaattgtacaaaatcatctactttaagtgatgcgccaccaactaatgcaccatcgatatctgattgagccatatattctttaacattatttggtttcacactaccaccatattgaataagagtcgcatcagctacatcttgactagacacgtctgctactgttttacgtacttgtgcacacatttcatttgcatcttctgaagtagctgatttaccagtaccgattgcccaaattggttcgtaagcaatgacaacttctttaagttgatcttctgacaagccttttactgcttcttttacttggttgcttactacttggttagctttgccattttctctttcttcatctgtttcaccaacacaaataattggtgtcattccatgattaaatactgcatgtgcttttttatttacatcttcatctgtttcatggaataattcacgacgttctgaatgtccaataacgacatatttaacacctaaatcagctaatgccactggagaagtttctcctgtatatgcaccattatcttcaaaataagtgttttgagcaccaatttttaatccttttgctttgccatcattcactagagagattaatgcatctaattgaattgttggcgcacaaattactgattcaacttccttttcatcaggtaatgtaggtaaattgtttacaaagtctttagcttcttgaactgttttattcattttccagttaccagctatgattggttttctcattattgacactcctattattaataaatttaaaattaattataaatatttacgttcttttattgttttcccatgaaaatcataaaagaaacatttttatgatttaaataaatattatttatcgttaattgctttgataccaggtaattctttaccttcaaggtattctaatgaagcaccgccaccagttgaaatatgagtgaaatcctcttcaaatcctagtgaaattgcagccgctgctgaatcaccgccaccgataattgtgattgcatcttctaagttagcaattgctttacatacaccaattgtacctttagcaaaattactaaattcaaatacacccataggtccgttccatactactgtatgagcaccttgtaattctttagtaaataactctattgtttttggtccaatatccattgcttcttgatcacttggaatttcatcaatagatacttcagtgattttagcatcgtttgaaaattctttagctactttacaatcaacaggtaatacaatttgatcgccatttttttctaaaagttctttagcaaagtcaattttatcttcttctaataaagatagaccaatttctttaccttgtgcttttaaaaatgtatatgccataccgccaccaataatgattttatcagcgatattcactaaatttttaataacatcaattttgtcagatactttagcaccacctaaaatagccacaactggtttatgcgggtcatttaccacaccaccaataaatttaatttctttttccattaggtaacctgcagctgtttctagatgagtagaaataccaacatttgaagcatgttcacggtgtgcagtaccaaatgcatcatttacaaacacatcacctaatgatgcccaatacttacctaattcaggatcatttttagattcttttttaccgtctaaatcttcaaaacgagtattttcaactaataatacatcgccttcatttaaatttttaattgcagattctaatttttcaccgcgtgtttctggaacaaacacaacttctttgcctaatttttcagttaatgaatctgctactggttttaaagttaactcttttttatcactttcttctttaactttacctaagtgagagaataataccaatttaccgccttgttctaaaatatatttaattgttggtaaagcttgaacaatacggttatcatttgtaatttcaccattttttaaaggtacattaaagtcagcacgttcaagtacaacttttccttttaagtctaaatcagaaacaattttttttgccattataatttcctcctttaaataggaattattaatataaaaataagcggagaagcgttagtgctccccgcttactcataagctaacttaattcaacattttatataagtgtactgagcacaagttttattaaactaggctacgaaattatttagttaattcagctaaatattctaaagtacgtactaattgagaagtataagacatttcgttgtcataccaagcagctactttaactaattgtttgtcgccaactgagatgacacgagtttgagttgcatcgaataatgaaccaaagttcataccaacaacatctgatgatacgatttcatcttcagtgtaaccgaatgattcgtcagcagcatttttcattgctttgttaacatcttcaactgttacttctttttctaatacaactgttacttcagttaatgaaccagtagctactggtacacgttgtgctccaccatctaatttaccatcgatttcaggaattactttaccgatagctttagctgcacctgttgagttaggtacgatgttttgtgctgctgcacgtgcacgacgtttgtcaccttttctgtgtggaccatcttgagtcatttggtcaccagtgtaagcatggatagttgtcattaaaccttcaacaataccaaattcgtcatttaaaactttagcaactggtgctaatgagtttgtagtacatgaagcacctgatactactgtttcagatccatctaagtctttgtggtttgtgttaaatacgatagttttaacatcacctttggctggagcagaaattaatacttttttagctcctgcattaatgtgtgcttcagctttttctttttctgtatagaaaccagtacattctaatactacgtcgatatctaaatcgccccatggtaatttacttgcatctggttcttcaaaagatttaacttctttaccatttacacggaaaccaccttcaactacttctacgtctccgttaaagcgaccttgcatagtgtcatattttaataaatgagctaacatttcgtcgtctgttaagtcgtttactgcaactacttcaataccttctacgtcttgaattcttctgaatgctaaacgaccaattctaccaaaaccattaattgctacttttactgccattataatggcctcctttaaaatgatatttaaaaagttaaataactttttattccttatttagtattactttagctgctgcttcatcagtaattaatattgtatttttgggggcaatactgagatatgctttgatagcttctcccttagacatgccgccagcaacagcatatataaaatctttgctttctaaatcttcaagttgtaatccaatagtttttactttttgaactacatgaccttgagcgtcaaaataatatccgaaagcttctccaacggcttgatgatgttgaagtctttcaatcacctcatcagatgattgtctacggtgcgccatcttcagcgcatcaccaataccgtgtattgttatatttgcttgtttaattttttctaatgtatgcacaactgatggttccatcagcaatgtattatatgttgattcgctaacattatctggtacatatagcgtggtataataaccaccactttgttgtgccatacttgctgcaattgtatttgcttgataaaccatattttcaccaagaccaccacgtgcaggaacaaaaaacacattaaatggtaataaatgcattgctcggctaacattagccattgttgatccacctgtcactgatacaattgcatcttcatacaatatatcttctagtaaatgacctgcttgtctactcatctcagacttaacttcttcatgcatgtcagcatttccaggtatgacatatacttctttaattccgaagttggacttaatatgtttagcgtagtgattatcatctttatacactttaaagtaatcacttaattgattaagtacttttgtaccttcttcagtgatttccataccagttgattttacttgtataagattttgcttttttaatatgtctgtttctgttcttaagactctttctgtaatatccatatgttcgcttaaacttctacgtccaacaggttcattatttgaaattgtcgttaagatagagaaacgtcgatacattttatcaactaagtcaggaaccaacttttgttgtagtttaatcaggtctttcactactaccttcctcctattttctcaaaaggtaatcgagagttagagggggtttgactttttttgtcccaggtgggacaaaattcaacctctttacaattgcaatactactattgtcgttataaaaaagcaagtgaaaacctttattattttaaataatctgttaaatatttaaaatagggtatagtaaatgcaatagagttaaccttatagataggtttttcaaaaatgatgaattataatttaaacattaactagataggaggaatcactttgaaatataaagacaataaggatgtagaagttttagatccttctgataatagatataaagatgatgactattttaaaagagaacaagaatatcgagatatttctgaacatcacaatacaatacgatatcactatggttgtggttgtccttttggttgtttctcttctatttttatatcgattgttctttcaattatcttaacattcttgcttaactggatattttaaaaaaacctagagatacacacatggtaaaatgtgtatatacctaggtctttttttattcttcgtttgaagatctttgagattgttgggtattactttttgattctgaagtagttgaactagatgattgtgttttaggttcggtagtagatggttgcatcgttgatttttgtgtttgggatgattgatttgtattagctcgttcttgtgtagtagttgtgtcattgttacttgacttatgttgtgatgtttcagttgaatccttagaacgagaagattgacttgactgagtgttttcatttgatttatctgtttcttcttgcgttgctttttcttgagttggtgcgttttctttttgttgagtttgtgagttttctttttgttgagtactttgaatttgatttgtattaggttgttttgtagatgtttctttagaagattgttgcgtttgtgctgttttaccttgattagtaggttgtacttttattgaattattttgctcattagaatagttatcagttacatttggattttttacgttatctaatttattttctttactattatttgtattgttttcacttgttgtattttcttgcgtactttcttcattctttttattacttttagtatctttatctttcttatctttatgttcttccgttgactgattatttaaacgttcattgactctgtttgaattatccacaaaagcaaaaactgcaaacaccaatccaccaagtaatagaagcacaataagtgtactaattattttagaaataccactcatttttttcttttcatgtgcttcatagtctttaagatttctatttttttttgacatggactccctcacttcttaattatctattcatcctttaatatagcaatctattttacattatttccttttaaaaaaatattaaaaatacttaagtacatatataaatggaatactcattcaattatacatgataacatcatatataaataactacactatcaatatgatgtaaattttggagtgacaaaatgaaaaaagatacttttaacacattattcaaacatcattcaagcaataaaattaaatctatgatgttaagtaatgatgattttgatgaaagtaaaaactcaaaatttgatatatttattggcattttaattcctataatcatattattcttaatcttatttataaagtaatataatagaaacttgaaagagaagagaatagaaagaaattaaaatgactcttgttttgtaaattagtatattaaaagtataaacatactttttaaatattctactattctctatagcaaagctatacttatattatagctaaatttaggtaatttaatgaccgtattttctaaagttaatgacataatcttgaatgctttttgagcatctttctctacattgtcattaaaaaaatttattttctttataaaaaatgaggtgttagtaaatgaaacaatttttaattactggtggaactggaatggtaggtagtcatttagtaaatgaaattaaaaaaagagaggctcatattacaattttaactcgtagtgataaacaaagtgatgagcctaagattacgtatgttaactggtctaaaaaaggatgggaaaatcaagtaccagatattgatgtagtcattaatttagcaggagctacattaaataaacgttggacatcctcttacaaacaaacgattatgacaagtcgtattcaatcgactgaatctttagttcatttatttgagcaacggcaacataaacctgaagtgctttttaatgcaagtgctatgggttattatcctccaagtttacatcgaacttatacagaacaatatcaaacacttccttttgatttcctgtcagatgtcgtttatcaatgggaacgatttgctcgtcgtttcgaaaattttggtacacgtgttatattgggaagatttagtatgattttgtcttctgaaggtggcgcacttcaaacgatgaaactaccatataaattctacgtaggcggcaaattaggttctggccgtcaatggtattcttggattcacatagatgacttagtgcgtgcgattttatttacaattgacgaatcaaatgcaaaaggtccatttaatatggcttctccaattcctgaacgtcaaaatttatttggttatacacttggacgtacgatgcataaaccacatgaaacgtgggtgccatcattaattatgcgtgctgtactaggagaaatgtcgacagtagttctcgatactcaaaaagtcttacctaataaattagaagcattagggtttaattttagatataataatttaaaagttgcacttgaagacttaattaacgaatagtatttggagatttagtaatgaatgacaacaagttaacgtatatcttactacttatcgctagtgtatttttaattttaaatggtatctttgctttcgaaaagagtattattatggtacttttatctttcttctttattattataggattattattagggtttgtagctatacattatttattaaaaactaaaaaaccataaaaaaaggaagagcatcaatgctcttccttttttacatgttaaacaattctatttacatatcttcaggttgcattacatgatcaattaaaccatattcttttgcttcatcagcagttaagaagttatcacgatcagtatctttttgaattgtttcaatattttgacctgtacgttcagctaaaatacgatttaatttttcacgtgtttttaagatatggttagcagcaatttcaatttctgtcgcttgaccttgagcgccacctaatggttgatgaatcataacttcagcgtttggtaaggcaaaacgtttaccttttgtaccagctgctaataagaatgatcccattgacgcagccataccaatacaaattgtttgtacatctggtttaatgtgttgaattgtatcgtaaatagcaaatcctgctgttacactaccacctggagaattgatgtataaataaatatctttttcagaatcttgagcttgtaagaataataattgtgatacaattgaatttgcaacattatcatcaattgctgagcctaacataataatgcggtcttttaatagacgagaataaatatcatatgcgcgttcaccacgatttgttgtttcaataactgtaggaattaaattcattatatttcctccttgtaattaactgttatatttattttacaataaaagtcaaaaatggtcaaaaataatacctttacatttatttgacgttgcgttttataattttatacactattcatatattcaaattgtactgttaattatatatttagtacagaaattagtttttatattatactcctcgtagtgtaatggatagcacgtaagattccggttcttaagatagaggttcgattcctctcgagggggctattattaaaaataggatgaaacgttatattaatgtttcatcctattttttaaaacacattttattttataattcgactttttctccatttctaattttatcagcgagttcatttaattttcgtaagcgatgatttactcctgatttagaaataggcccatttgatatcatttctcctaattctttcaaagaaatttcttgatgttctactcgtaattttgcaatctctcttaaacgatcaggcaaattatctaaacctatttcttcatcaattaattgaatgctttgtacttgtttcatagctgcactcacagttttatttaaattagctgtttcacaatttactagtctattgacagagtttctcatatctctcactattcttacatcttcaaattttaatagtgcttggtacccccctatcaaacttaaaaactcagaaattttctccgcttctttcaaataagagatacttcctttttttcgttctaaatgcttagcatttaatccataactgttcattagtttagttaatccctcagcatgcccttcatattgagaaaaaatttctaaatggtaggaagaggtttctgggttgtttactgatccacccgctaaaaatgctccccttaaatagcttctacgcatttcatcatctttaatcatactcgcatcaatatcatgaacaaaaataccattttttaaaatacctaattcatcaagtatttctttaacacgtactttagttcgacaaatatagatattattcttttttaatttcattttttttcgtactaaaatttctacttccacattaaaaatacgcttaattaatgaatatattcttcgagccgtagtcgcattttcagtttgaacattaattacaaattgttgattagataaactgagtgcaccgttcatccgaatcaaagcgctaagttcagctttagcattactttcatcgacttcaatacgggtcaattcacttttcatatctgatgcaaaactcattgatgctccctccttttctcatcatcattattatatgtaattaacatcccaaaatatataacactctatatcaaattatttttaaattcattaaaatttattttttaggtttaaattgaattgtacttgttaattcaagtgctaaatcatatataaggttagcaagcacctttgtattatgacgaacgaggacgtggtcataaacttctacaagatttttagaagtaatcattttaatatgattttctgttaattttattttattcatattaacaggatgagcattacgttctttatatcgttgaagaatctgttcatcaaatgcatcattactacaaataacataatcaataaatggttctccagcatgttgatgaatagctttaatatgatcgtagacatcataatcatttgtttctcctggttgagtcataatattagatatgtataatttcggtgcttgtgaacttattattgctttagaaataccttcaatacacaaatttgaaattacactcgtatacagtgaaccaggacctagaacaattaaatctgcttcttgtaaagcatcaacagcttcctgcatgggttctacattagatggttctaaatagacacgtcgaatttttttattttttttaggtattttagattcaccttcaacaatctcaccatcttctaatacagcatttaacataacattagtattagtagatggaatcacttttcctttaatgtttaaaattttacttaattctttcactgcatgaccaaagtcattttttatatttgtgagtgctgcaagtaataaattacctaatgagtgaccttcaatttgatgttcttcaaaacgatactgaaataattcttctagaataggttccgcatcacttagcgctgcaatgacatttctaatatctcctggagcaggaatagacatttcatccctaattttacctgtactaccaccatcatctgcgactgtaacaatagcagtgatatctattggatattctcgtaatcctctagctagtactgagagtcccgtacctcctccgattagtactactttcaactgtttcatttcttcacgccactttcaatatgtgcatctctatgatgaacatacacattataatcaaatatatcatttaactcttctccgatacgcttagctaaggctacagagcgatgttgtccgccggtacaccctattgctataaccagttgcgatttaccctcttttttataacctggaatcataaaaataagtaaatccattagtttttcaaagaaagtttcagtttctttccatttcatcacataattataaactgcttcatcttctccagtcatcggtctcaagtcttcaacataatatggattaggtaaaaaacgtacatcgaatactaaatcagcatctttctgaataccatgtttaaatccaaaactagttacattaatactaaatgaattcattttttcattggcgaaacgacgtttgattctttcttttaattctttaggctttaactctgtagtatcaataatgtaattcgctattgacctaatatttgaaagcaattgttgttcttctagaattgaatcaattaaagacatttgaccattttgatttaaagggtgcgctctacgtgattctttatatctagaaattaatttttcagttgtagcttctaaaaacataatatctacaataacatcatttcgcgttttaattgcatcaatttcatctacaagtgatttaaataactcttttcctcttaaatcaattgcaattgctactttttgaagtgaaggattaccttgctccattaactccacaagtttaggtagtaatataggcggtaaattatctacacagaaaaagccaatatcttctaaacattgaataactaatgatttaccagcgccagacaatcccgtaataactaatagttcacttttgctcatttcatcatttatttgattaaccattctaagcaccatccatttaatcatacatatatttatataacatcatagcatatatttttacattgctaacaatttgtatcgactttactgctaagaaaaaagctagtaataatacttctatcagaagtgattattctagctttaattaatatcttaagcttcttctttatcatttaattcttcgatataatcaattgcactttgtgcagcaatactaccatcacctgtagcagttacgatttgacgtaatcctttatctctcacgtctccagctgcaaaaatccctggtacagaagtagtcatatcatcttttgtaataatatagcccatatcatttgtaatacctaaattattaaatggtgctgttagaggtttcataccaatataaataaagacaccgtctgcatctaacgtttgctcagacgcatcttttgttgaaactaacgttacagatcctacttttccatctttttcattaattgatttcaaagtgtgactccaaataaaatcaattttttcatttttaaatgcacgatcttgtagaattttttgggctcttagttcgtctcttcgatgaacaattgttactttatcagcgaatttagtaaggaatgcaccctcttctaccgctgagtcgccgccaccaataacaaatatatttttgtttttaaagaatgcgccatcacatactgcacaataacttacaccacgaccacctaattcttgttcaccagggacaccaatttttttatattctgcacctgttgaaataatcactgctctagctgttattgttttatttcctagattaatcactttgtgatcgccattatcttcaattgatttgatatctccatattgataagaagcaccaaattttttcgcatgttcaaacatttttgttgataaatctggacctgtaatcatttcaaagcctggaaaattttcaacttcttccgtatttgccatttgtcctccaggcataccgcgttcaatcatcactgtatttagatttgcacgtgatgcataaactgcagcagtcattccagctggtccagccccaattatcgcaacatcaaaatctacttcgttcatttttatacctcctacgtttatattaatacgcgcattatatagtattatttgcttttcataaatttatatgctcaataatttatcaattgcgttatctaatttatatcttgtagtattaaaaatttcaataattttctttttagttatatgctttttatgataacggtaatataaataaacatgtgccgcaatatatctatttaactctttaaaattaacgccttcaacgattaaagcttctcctttatcaatccaactgacaaataattctgtatcaaacgatagttcttcaacgtcatatattttctttaagcctttatgaataaaatcaagcttatttaaatgtaatccttgaactaagtaagttaaatataacttttcatagtcattcatgttttccaatactgaccaaatgtcttcagtcattagtatttcttttccatttaactgatttaataaaaatacgccatataatcgataatgactgtcatcatctaataataaaggtaatattttttgttcaaatgtgtatttactttcttctaatacccatggggcataccccacatttacttcagaaatttgcaataatttatcccaaaatagtttactttgttctttatttcctaagtaataatagttataacttaaagcattaaacatttgaactgaaacaaacttaccctttttatataaaggtaataaaagttgttgagacgctttgtactgtttaagataacttagtacaatacctaacttaaaactttcatcttcattcatcggcatcactttatttaatatttttatatatttgtgatacttctctgtttcattagtattatataatagcaatgtataatgacatagtgcatgaacatccgagttatcttcagcaagcaatgtttcgaataattctttagcaatctcatattcactcaaataaagataacacattgctagtaaatttctaataacgcgatgcgactgaatatcatcgttttgttttaaaatatacgttcgtgcttcttgtaaccgtccttgagcgaataaatattgaaataataattgaactgcaaataattgtgcttccatttcaattttattttcttcaatataagaaacttcgaacatgttttctaattcttctctaaaagaatcatcatttgataaaactacataattaataccaaacaagaaggccttgtttggctcattaagtttaatattcagctgactcaattgataataactttctgatacattatgatcatttataatgctttcataaaacattttttctgcttttttattcaaattcaattcatttaaacaatcggcatacttaagttttatatcaaaatcttcaggtgacaaatctagcacatttccataatattcagctgcttttctataatttctctgtttatatttttgatctgccatctttcgataaaaattctcatcaaaagtcattggaataattttttgttcctttcgtgccatgctttgtcaccactttcttatttattatgaatttgcatggggtttccaaaagcaatagtatcattgggaacatctttagagacgatagtacctgctttaatcataacgttatgaccgattttcactccaggtaaaatggtcacatttgctccaattaaagtatgagaaccaatgtccactcgtccataacgatactcatttactaaaatttcatgcgttaatattgttgtattataaccaataacagtattactgccaatagatattaactggggatgaaaaatatcaggcattaccttataggcaaatgcagttcgttccccaattgacatcttcaagaaatgaatataaacatatcgtttcacatttaaaaaaggaataaatcgacttatttctattattactgtattttttaacactttagaaaaacgaacaaattggtaaatgcgccataagggattcatcgactgtgtattaataatagttaatcgtctcattattttactttccctcttgaattccaagttaatggtccagcatttttataaatagctggttgatattttattcgacgatagataatcaaagtcataccaataataattaaaataattgaaacaagttgagctatgcgaatatgacttgttaacattaaactgtctgttcgtaatccttcaacgaagaagcgccctattgaataccaaatgagatataatgaaaatgtttctccaacgcgtaaatactttctaagagtaattaatataataaaaccaagtatatcccaaatagattcatataaaaaagtaggatgatagtatacaccttcaatatacatatttcgaataataaattctggaatatgcatattttctagaaatgttcttgatactggtccgccatgagcttcatgattcataaaattgccccatcgccctataccttgagctaatataatgcttggtgcaacaatatctccaagttgaaaaggattaagatttttcaatttacatagaataattccagtaataaagccacctattaatccaccgtgaatagctatcccgccatgccaaattttaggtatttctgatggattttccatataataaggccattgaaatataacaaaataaattcttgcaactagaaatccgaaaattgcacaataaaaaataatatctactaatgtatctttatgtaatcctatagatttcaagctttcttgagcaataaaatatccaatcaatattcctactgcaataataattccataccattttatcgataaaggacctatatcgatagcagtaggattgatataattcaaattaaaaaacatatactatatcccttcattctgattcccattcttgagaatttcttcatttaaacgttgattaaattcttcagctgtattaatacccatgatatttaaacgataattcattgcagctacttctataataacagcaacgtttcttcctggtcttacagggattgtttttttagttatttccgtatctaaaatctttaacgtttcttcatttaagccaacgcgatcatataatttattcttatcccaattttcaagatttatatttaaccgtatttgtttttgggttagaattgaccccgctccaaataaagtcatgacattgataattcctagtccacgtatttctaataaatgttcaattaacttaggtggtgtaccaatcaattcgtctttcgtaatttcgcgaatttcaacattatcatctgctactaaacgatgacctcgttttactaattctaatgctgtttcactttttccgatgccagagtctcctgtaatcaatacgcctacaccatatacgtctactaaaacgccgtgtagagaggtcgttttagctaactcatgttctaaaaatgtcgttaatcgactcattaaacttgtcgtagcatctttagaaacaatcaaaggtgtctccatttcttgagccgcttcaatcagttcctgagggggctctaatcctcttgtcacaataattgctggggtttcaggacgacataattttctcattcgtcctcgtctttcttcatctggtaataaattgtaaaatgataattcagtggtacctaataattgaatacgatttgctgcataatgagaaaaataacctgccatttctaaaccaggtctagaaatatcaatatttttaattgttttatttaatcctttttctccagtaaatagcttcagttttaatactttaaccaatctctctgtcgttaacatgagttcacctcaaaattcccttgaattaattcatctcttatcatatcaaaaatataacaatatgttatataaaaaaggagtagaaaattatttttctactccttttttcaaaaccattaaaatgatattctacttcatttatactctaaaaaagcactatcgcacattaaattctattttattcatctcgcactttatcacgttctaacactgtttttaagtactcacctgtataagaagcttccacacttgcaatgtcttctggcgttccagttgcaacgatagtaccgccaccttctccgccttctggtcctaaatctataatataatctgctgttttaataacatctaaattatgttcaataataaccactgtatctccattttccacaaggcgatttaatacttttaataatcgactgatatcgtcaacatgaagacctgtagtaggttcatctaagatataaattgatcgtcctgtagaacgtttgtgtaattctgaagccagtttcacacgttgtgcttccccaccagaaagtgtggttgcttgttgccctagagtaatatagcctaatcctacatctacaagtgtttgtaattttctatgaattttaggaatattttcaaagaaataagtcgcttcttctactgtcattgctaatacatctgcaatattttttcctttatatgtgacttctaaagtttctctattgtatcgtttgccatcacacacttcgcatggcacatatacatctggtaagaagtgcatttctattttaataatgccatcgcctttacaagcttcacaacgaccacctttaacattaaaactaaagcgtcctttttgatatcctctaattttagcttcattcgtttgagcaaaaacatctctaatgtcatcaaatacacctgtatatgtcgccgggttagaacgtggtgttcttcctataggtgactgatcaatatctataatcttatctaattgatcaatacctttgatctcatcatgctctccaggtttaactttagaattattaattgtttgagctaatgatttatataacacttcattaactaatgaacttttaccagatccagaaacacctgttacaaccgtcattactgacaatggaatatctacatcaacatcttttaaattattactttttgcacctttaattgagattttacgattcgtaacttctctgcgatgttccgggacgtcaatacgttttttaccgctcaaatattgaccagttaaggatttcttgtctttcattacctttttaggagtcccacttgagacaatttcaccgccatgattacctgcaccaggtccgacatcaacaaggtaatcggctgctctcatcgtatcgtcatcatgttcaactacaattagtgtgttacctaaatctctcatctcttttaatgtattgattaaacgatcattatcgcgttgatgtaatccgatagaaggttcgtccaatacataaagcacgcctgtcaatcgtgatccaatttgagtagcaagacgaatacgttgtgcttctccacctgataatgttcctgaagaacgattcagtgttaaataatcaagccctacattatttaagaatgttaatcttgaaataatctcaattaaaatttgtttagcaatcgctttgtcttgctctgataactctatattctcataaaatttgagtgcatttttaattgaatattctacaacttcgccaatattgtatccaccaacatatactgaaagtgcttctttacttaaacgtttaccgtgacatgtttcacatggaagttcagtcatatatctactcatcatttcacgtgtatattctgatggtgattcgtgataacgtcgatctatattagggactacgccttcaaatttcatttttctacgacgtgtgcctccatttcgactatgaaatgaaaactcaatttctttatcgcctgacccattcataagaatatctttttgtctatcagtcaattttttatatggcttatccatattaattttataaacttcacatactcgttttaataatgttggataaaagtcggaacttgtaggctcccaaggttcaatcgcaccttcatttaaagttttattagtatcaggaacaaccaaatctagatctactgtaagtctttgacctaatccatcacatgttggacaagcaccgaatgggctattaaaactaaacattctaggttctaattcacctatagaaaatccacaaattggacaagcatgattttcagagaatttgagctcttctccaccaatgacatcaacagtaaggtttccttcacctagctctaaacttgtttctattgaatctgctaatcttgtttctattcctgattttacaactaaacgatctacaactacttcaatagtatgatttttatttttatctagtgcaggaacctcgtttacatcgaccacttcaccatcgacacgtaatctgacatatccctttttgccaatatcttcaattaatttttcatggctcccttttctatgtgaaactaaaggagctaaaatttgaattttagttctttcttctaattctaatatacgatctaccatttgctgcacggtttgcgattcaatttcgattccatgatatggacaaaatgctttccccacacgtgcatataataatcgaatgtaatcatatatttcagtcacagtagctactgtagaacgcgggtttttacttgtcgttttttggtcaattgaaattgcaggtgatagtccctcaatggtatcaacatctggcttatccatttgtcctaaaaattgtcgtgcgtaggcacttaacgattctacatagcgacgttgtccttcagcatatattgtgtcaaatgcaagtgatgattttcccgacccagagagaccagtcatcactataagtttgttctttggtaactcaatatcgatatcttttaagttatgtgctcttgcacctttaactacgatacttggacctttcatgtaataatcacccttctgcttttagttcaaataacatatctctcaattctgttgctctttcaaagtctaaatctttagctgcttttttcatttctttttcaatattttcaattgttttctgacgttctttctttgtcattttcttaggtacttcagtttgttgcttttcatttgtttcatcattatccactgtagcactaatgacatcatgtatttttttattgattgttttaggagtaataccatatttttcgttatgtgtcatttgtatttctcgacgacgctgtgtttcatcaattgcgtactgcatagagtctgttatcttatcggcatacatgataacttctcctttatcgttacgtgcagcacgtccgatagtttgaataagtgaacgatttgaacgtaaaaatccttctttatctgcatctaaaataactactaacgacacttcaggtatatcaataccctctctaagcaaattgatacctactacagcatcatatgtgcccattcttaaatcacgtataatttctatacgttcaagtgttttgatttcagaatgaagataattcactttaattcctgcctctttcatatatgttgtcaaatcttcactcatttttttagttaaggttgtgacaagtacacgttcattcctatcaattctttcttgaatttcactgagtaaatcatcaatttgattcttcgtaggtcgaacatcaattttaggatctaataaaccagttggtcgaataatttgttctaccattttatcagtatgttcaatttcatatggaccaggtgttgctgaaacataaacgagctgtttagttttttgttcaaattcttcaaatttaagcggacggttatccatagcacttggtaaacggaaaccatgatctacgagtacttttttacgtgcttggtctccattaaacatacctctaatttgtggtaacgtcacgtgcgactcatctatcattacaagccaatcatcaccaaaataatcaagtaaagtataaggtgtggaaccaagtggtcttaatgttaaatgaacagaataattctctattccagaacaaaagcccatctctctcatcatttctaagtcataatttgtacgttgttctagacgttgtgcttctaataatttattttcagctttcaattcttttaatagctcttcaagttctttttcaatacgttcaatagcgactttcattttttcttctctagtaacaaagtgggaagcagggaatatggcaaaatgttctctttcacgtatcacttcaccagttagataatttacttctctgattctatcaacttcatcgccaaagaattccactcggatacacatttcttctcttgaagcaggaaagatttctacaacatctcctcttactctaaatgtaccacgttgaaaatcgatgtcgttccttgaatactgaacatcgactaattttcgaagaagctcacttctatccatttccattcctactcgaacgctaacaactaagtctttgtattcttctggattacctaaaccataaatacaacttacacttgcaataataatcacatcatcacgttcgaataaagcacttgtagctgaatgtcgtaactgatcaatttcatcgttaattgaggcgtctttttcgataaatgtatccgttgatggtacatatgcttcaggttgataataatcgtagtaactcacgaaatattctaccctattttcaggaaagaactctttaaattcactatacaattgacctgctaacgttttattatgcgctataattaatgtaggttttccaacttctttaataacattactcatggtaaatgttttaccagtacccgttgcaccaagtaatgtttgatgacgtttaccagctttaacaccttcaacgattttttttatggcttgaggctggtccccttgtggttcaaattcagaatttaatttaaaaggatgatgttctaccattctttcaagcgcctcctcagtttatttttattaattgtttatttcagtaaaaataatactatttatacttattttaacaaaaaagtaaataaaaaaacaaacgtttgttcgcttacgtttgccatcattttttatacatatataaaagatgagacacaaatataaattcatttctatatttatgcctcatcttaatatgttgacgtatttttattagatatgtattaataatataaaacaaatggtatagtactgcaatttttttggcttaatcttgatgtttgtgaaattctaaattatcaataatcacataaccagctaggatagatactacatctaaaaatataatccattcattatgaaaaaatcctttatacactgaagcggcaattaatatcaatgttacaataacgcctacccatttacttctggtaatgacactaaataaaataactaagatacaaggaaagaaagcagctaaagtataccataccattatattcactcatttcttcttcgtcgttctaagattgtcattgttgtttcacgtagttcagcacgaggaataaagttttccgtaagcatttccggtataacgtgatcaataaaatcttgtactgaacttaaatgatcaaattgcattattgtttctaggctatgttcataaatttcaaaaaacagatcttccggattacgtttttgaatttcaccaaacgtttcatataataagtcaattttatcagctactgataaaatttggccttctaaagaatcatcttttccctcttgaagtcttttacgataaatatcttggtatggcttcggaatttcttcattaatgaacgtatctaccatttcttcttcgacttgagaaaataacatttttaattctctgcttgcatatttaactggtgtcttaatatcccctgtaaatacttctgcaaaatcatggttaagggctttttcatacaagcttttccaatcaattgaattaccatgatattcttcaactgttgctaagtattgagctattttagtaactttaaatgaatgtgctgcaacattatgctcaaaatatttgaattttcctggtaatcttattaatttttcaagatcagataaacgtttaaagtattgatgaacccccataatgcggttatacctccttatattattaaatagaaattatacttgtatttattatatcaatcaatcgtttagtaaaaagttttaattgtgataatttcataacttttatttctttttttaaacaatacattgcattattaataactaaaaaaacatcaacaaaacataagctttgttgatgctttaacattataaatcctttgaaaatttaatgtataaaattataactagacgaattataaattgttctatttgtaacatcattgaaatgaccattccaattcatctctgaaacataaaacgaaccatcattgttcacacgttctacgatgcccacgtgaccataataacccgctggtgtttggaaaacagcacctacttctggacgatgatcgaccactaaaccagcatttctagctgagcttgcccaattatttgcatttccccaatagctccctactgaacgtcctaattgttgtctacgatcaaatgcataatatgtacagttaccaaaataataatgattaccttggttatttaaagcgctattattataatatactggtgcacttactgtttcagtattgtaattattactagtaacatatgatggagacgctacatatgacgcagtttcagcgctattatagcttaatggtgcagtttcagtttcacttgaataaggcgtagcatatacactactatcacttatcaattgactttctaatgttgctgaacctttgtcacttactgcgattaaatcaccaggatgaattaacggttttactcctggattaaatgcatataattcatctaatgttaaatgatgagcattcgcaatgttgtttaatgtatcaccagatttaacttcaacaatatctttatcaggtacaactattgaaatatctttttcaacttcctcattacctatatgatttaatttttttatctcatctgcagttgtagaaaattgttgtgccaatgcttctacatttgttttttctttaacaatgtgtgtttgttgtgcatgtgctaacgtatttaaacctgtaattgctgcaattgaagcaaatgttacagtcattgatttttttaacatgttgtcattcctttgctgtagtgtatgcttgttcattaatactttagcataaacaacattaaaaaagaggaatgttaaaaccttgtaatataaaggttaaataacactcctaaattagtttaaattgattaaattagtaatattacaagtcacgaattacattttaaagttagatttatttagattttaaaattttattttttattaataaacaactcaatcaatcattttgtgacatcgtttgtcgtaaataagcttctataaatggcgcaatatctccatccattactgcatctaccttagcagtctcttcatttgtacgatgatcttttaccatagaatatggatggaatacatacgaacgaatttgactaccccatcctatttctttttgttcaccacgaatttctgccatttcacgttcttgctcttctaacttcaattgatataatttagatttcaacattttcattgcagcttcacggttcttgatttgagaacgttcattttggttattcactacaattccggttggatggtgagtaatacggattgcagactctgttttattgatatgttgtccacctgcacctgatgctctaaatgtatctactgtaatatcatcaggattaatttctatttctatctcatcattatcaaattctggtataacatcacaagaagcaaatgacgtatgacgtcttccagatgaatcaaaaggtgaaattcttacaagtcggtgtactcctttttctgcttttaagtaaccgtaggcgttatgacctttaatcaataatgtaacgctttttactcccgcttcatcacctggtaaataatcgatggtttctattttaaagccttgttgttcaccatatctttggtacattcttaataacatgctagcccagtcttgagattcggtccctccagcaccaggatgcaactctaaaatagcattatttgcatcatgtggaccatctaataataattgtaattcaaactgatcgatttgttctctgaatgatacaatatcttgttctaaatcttctttgatttcatcatcatattcctcttgaagtaattcccatgttgcatccatatcttctaatttatgattgagctcatagtaaccattaactatcgattttaatgcattatttttatcaataacatcttgagctttattttggttatcccaaaagtctggttctgtcatcatttcttcatattcttgaatatttgtttctttattttctaagtcaaagagaccccctaatttgttctaaatcattattatattcatcaatattacgtttgatttctgataattccactatatatgtctcctttatttataaattctttaaataaaatacgagatcgcgacaaaagcttttaaatgataagcaatatacgtctcgatctcgcctaattataattacttgatattaatcttctttaccatggcaatttttatattttttaccactaccacaaggacaaggatcattacgtccgattttttcaccttttacaataggttgtttttttgctttttctttgccatcttcagcagatacgtgttgtgccttgccaaaatctgttgttttttcacgttcaacttgttcgtctacttgaataacagattttaatatatatttagacgtatcttcttcaatagcttgcatcattaagtcaaataactcgtgtccttcattttggtaatcacgaagtggattttgttgtgcatatgaacgtaagtgtataccttggcgtaactgatccattgtatcaatatggtcagtccaatgagtatcaatagaacgtaataaaatcatacgttcaaattcaggcatttgatctccaattttttctttttggctttcataacctttttcaattttagtccataccacttcaaaaatgtcttcagaatctttacctttaatttcttcttcagttaattctccttcttgaataaacacatcattaacataatttataaatggtccataatcaggattatcgtcttcatcgttaatatagtagttaatcgctctctgtaaagtagtacgcatcatcgcaataacaatttctgaactatcttctgaatctataatgctattacgttcattataaataatttcacgttgtttacgtaatatttcatcatactcgagaatacgtttacgtgcatcaaagttatttccttcaacacgtttttgagctgattcaactgcgcgtgaaaccattttagattctattggcgttgaatcatccatacctaaacgattcatcattttttgaagtctttcagaaccaaaacgaaccattaattcatcttgtaatgataagtagaaacgactatcccctttatctccttgacgacctgaacgaccacgtaattgatcatcaatacgacgagattcatgtctttcagtgcctattactgcaaggccacctatttcttctacgccttcacctaatttaatgtctgttccacgtccagccatattagtagcaatagtaactgcacctttttgtcctgcattggctacaatttcagcttctctttcatgattcttcgcatttaatacatcatgacgtataccgcgttttttcaataaatttgaaatgtattcacttgtttctactgcaacagtacctaataaaactggttgtccttgtttatgtttttcaaccacatcgtctacaactgcatcaaactttcctttttgactaatataaattaaatcagacttatcttgacgttgaacaggtttgttcgttggaatttgagttactgtcatattatagatattacggaactcttcctcttcagttttagcagtcccagtcattccagctaatttattatacatacggaagtagttttggaaagtaattgaagccattgttttagattcattttgaattttcacgccttctttagcttcaatagcttgatgcaatccttcagaaaaacgacgtccaggcattgtacgaccagtgaattgatctacaattaatacttctccatctacgaccatgtaatcgacatcgcgttgtaaagtcacatgtgctcttaaagcagtattaatatgactaataatatctacattttgaacatcatataaattatcaattttaaacattcgttctgctttatctgcaccttgttctgttaaatgaacagcttttgttttttcatcatatttataatcttcatccgcttttaacatcttagcaaaaacattcgcttgagtataaagagacgttgacttttcagcttcacctgaaataattagcggtgttcttgcctcatctattaaaatagagtcaacctcatcaataatagcaaaatgtaatggtctcattacgcgttcttccgcataattcaccatattatctcttaagtaatcaaagcctaattcattatttgtactataagtaatgtcttttgcgtatgcttcacgtttttcttcagtagatttgctatttagatttaaaccaactgttaaacctaaaaactcatataattcagccatttcttcactttgaacactagataagtattcattgactgtaataacatgaacgcctcgtcctgctaaagcatttaaatacgttggcattgtcgcagttaatgttttaccttcaccagttctcatttctgcaatatcgcctttatgaatagcaataccacccataacttggactttataaggtgacatgttaaatacacgttttgcaccttcacgtactaatgcaaatgcttgtggtaaaattttatctaaatagtcattttgtttttttacatcttcaattgcttgtgcttcttcttgaaattgctttgttttatttctgatttcttcgtcagttaaaatcgccattttttcctctaaagcaagtacttcatcagcttttttacttaaacgtttcacttctttcttattgccgtcaacaatttttgataaaaatcccattatgttcgctcctttagctaaaaaaactgtttggcctacaacaatttataatatcatttataagttcaaatttatacttaaatactcatataaacgatatgcttaattgtgtacaataattacttttatatttaaactttctttctatttcaaaaaacttactatcctttaatttttaattacctcattacattagcatagcatgattataccgtccatgaataagtgtaaaatagctagttgatagtagcttcatactcattcttcacattgtacgatacatataatatttattattctcttctaaataataaaagtacctgggacatcaacttgtctcaggtacctttaaacaagggagtagtcattgactgaattgaatacgtgcctatgtcatgcattttcaattctagtcatagctcctctcatacttaaactttcgtaaagaacgtctacattcaactattcagttgtttcaatcagaccatatttaccatctttacgtcgatacacaatacttgtaccatctgtttcacgatctgtaaaaatgtaaaaatcatgccctaataaatccatttgtaatactgcttcttcagaatccattggttttaagctaaactgtttagaacgaataatttctatttcattctcatttgatgattcagaagtcgcttccacatcctcattcactactgtttgttgctcagcaataaatggttctggttctccattatctctattcttacgattcacacgcgttttatatttacgaacttgacgttctaatttgcttgtaactaaatcaatgcctgcgtataaatcgtcgtgtcgttcttcagctctcaatgtaacattttttaaaggaattgttacctcgattttagtagctgaattttgatacgttttaacttttacatgtgcaactgcatttggcacattattaaaataacgttcaagtttaccaattttttcctcaatatagttgcggatagcatctgtaatagtgaggttatctccatgaatttcaaatctaatcatagttatctctcctttaacctctaatattggtattcttactattataatatcatgtttaagtcatcttaaaaacgcaaacactttgaattttctgacttttttattacataatacactccccgcataatgaactgtcaaaccggtagtatagatatcatcaatcagtaaaatatttttattcgtaatatctatattttctttaagatagaacggattgtcagctttaaatcgctctctttttccaagtcttgattgcttaggtcgtgaacgtgtccctaataattctatatagcttacccccattttgtccaaaacagtggttactggattaaacgttcgatgttcatctcttttataaggggatgggatagggacaatatagtcatatgacgttttaggcaatgttaactttgaagctaaaacctcagctaaatagtaatccttcataaatttgtaatgatgaatcgtttctttcattattccatcatatttatattcacaatacagttgtgacattagagtaaattgttgattgagacatttacagtctaaacattcatcacttgcttttattttataattaagacatcttgtacatctttttttatcattgatatcaagtttaatggcttgccattgttttgtgcatgtttcacaaaattgttgtggtgatttataaaaattaaatatagatagttcttcgtgaataggagtagcacactgaatacatttattcatcaatccaccctctttgaatcactaatttattcatttttgtaatatcttttttagccatcaacattgatatactcacaccttcatgaagaaataatacctttcctgtgggagcttcttgtttacgtccaactcttccagcaatttgtactaatgtagccttttcaaatgtatctgcattaattacgataacgtctaattgagccatagtaaatccacgttctaaaattgttgttgtaaaaacaattcgatgttttccttcacgaagtgctttcactttttcaaaacgtaaagcatcttcacttgaaatacatatcaaatctgaaaatatttttttatagtattcggatatcttaatcatattttctatattattaaaaaatactaacgtaaatcttttatgttcaatctgatttaataacatgtactttaaaaaactttgagtacgattcatatttaatttaaaatatttaaattttggaactggtaatgggtgtctatgaaagcgagcaggtaactgtataatgcgatgttttggtatttgatgcagtaaatgtctaggtggcgttgcagtcatataaatcaatgtagatagcggtttagccgcttgtttaatagcattttgtagatgatgatccataggaagcggaaatgcatcaacttcatcgacaaaaataacttcaaagtgatttttaaatcgatatagttgatggatagtacaaattacaaaatgtccgttatattgttgtttacttgattgatgcaatacgtcaatattttctttcaaaaaaacttctttaatacgctggctaatctctattactacatctactcttggagagatgactgctacattaaatcctcttttacgtgataagctaataccctcatatatcatctctgtttttcctgcaccagttaccgcatataatagtaagttttcacagttttctatagcagataagattttttctgatgcataacattgctgttcagataatttaaaagataatgtatataatccctctgatttaacatttttacttttaatgattttatattcagtaatattatccattcttcctagatgtatacattgtcgacaatatattacttctttattaagaatagaggaaaaatattgatagaaatgagcactatcttcattaccacattgaatacatcgatatccttttgaactctttacgatacctaacgttttctcactgattatttcatcttttaattctatttctgaagatactaatcttccataatatttaatatttcatcacttccttattaaaataaaaaaagtctaatcgaaaaggagatgggtaccttagccctccatgttctcacttttaacgattagaccttcatcttatttgattacaatttttcttgggaaatatccaactccgattccacctgaacctaaatgagatgcaatgactggtccatattcacaatattgaatattaatgtttgaatatttctcttttaatttagcacaaaaatctttaccctcttttgttttatctccattaatcacaaacactgttacatcattaatatttttcgcaatatcaagtgcatgttgttctatagaattataagctcgcttacgtgtacgtactttttctaaaggatgaatttttccatcttcttcaaacttaagcactggcttcatttgtaaaagtgttccaatccatgcttgggcaccagtaatacgaccacttttttgtaaattttttaaatcatcaacaaataagtatgcacctgtatctttacgaatagacgttaattcctcaataatttcgttaggggttgctccgtcttcaatcaattttaatgtataaatcacatagctgccttcaaccatagaagctaatcttgtatcaaatgtgtggacttgaatgccatctaccatttcacctgcttgtgttgctgattgataactcccactaataccacttgataaattaaagacgataacatctgtataacctttatctctcaattcctcgtagttctttatccattcaccaatagctggttgacttgttgtaggaattgttttagatgcggccatttttttataaaaagattcttttgaaagatctggatgttcagtaaatgtttctccatcatcaaatgttacactcagtggtgcaactggtatctgatatttttcaataatatgttttggcagattcgcagtagagtctgtcattactgcaattttcataatcgtcctcctcaattatactcaccagtattataaattattttaataaaaaaggaaattcataatcaattatttatctaaaagaaaacaaacgtgtataataaaattcatattaatcatatcgtggaggtatttatcaattgagtgatcgtgttattactataaaaaaagaacatattattgaaaatacaattaataaatctcgatttattgctcatatcaaacctgtttcctcagaagatgaggctaagatgtttatagaagaagtaaaacaaactcataaagaagcaacacataattgttctgcatacactgttggcaatcaaatgaatatacaaaaagccaacgatgatggagaaccaacaggaacagcaggtattcctatgcttgaaatattaaaaaaactggatattcacaatgcttgtgtggtagttactcggtattttggtggcattaaacttggcggtggcggattaattcgtgcatatagtggtgcagtacgagatgtgatttacgatatcggccgtgtagaattaagaaatgctattcccactactgttaccattaattatgacttaacaggtaaatttgagtatgaacttgcttcaacttctttttttctaagagacaaagtttacactgataaagtgagttataagattgatgttgtagaaacagaatacgattcatttatcgaatttttaaaccgtaatacagcaagtcaatatgatttagaaaaagatacacctaagcaattaccttttgatattgaaacaaattaattaaattacaaaagccagcaaacgcttaagattgctggcttttgtaaataagtgaataaaaatattatttatggtttgtcttatggcgagatgcatcgtcattttttttagaaattaaattaagaataggacgataactatcatctattaaaccagtaaattcaacgatgagttcaattgtgatgacgattaagataaacattagtaatacacctaatggttgagataaatacaatataatactcgataaactaaacataatcgcaatagagtatatcagtaatactgtttgacgatgtgtatatcctaatgcaagaagtttatgatgtaaatgtgatttatctgcttgcataatgtgttgaccatttctcactcttctaatcattgcaaataaggtatcaataaatggtaccgctaaaataacaattgggaagaataaagaaataaatgtgatatttttaaaacctagtaaggataaaaagccaataataaatccaatcattaatgctccactatcgcctaaaaagattgtagcaggatggaaattaaagaataagaagccaagtaacgcgccaatcagcaaactacaaatcataatgataaatacatttccttgtaatatagctatgaaaccaatggtagttaaaccaataactgacacacctgatgccaaaccatctaaaccatctattaaatttattgcatttgttattgctacaatccatataattgtaatcggtatacttaaaataccaaaatgaatggttggaccaattggaaaagaaataaaatctatggtaatcccgtaaaaaacaacaactgatgccgctataatttgtccaattaactttaaaattggcttcaaatcataaatatcatcaatgatgcctacaaaatacataataattaaaccaattaccaaaggtttaactgccctctctatgggatggcctaaccataaaccaataagaaatgaaagtagtatgacagtacctcccatgactgatactggttttgtatgtacttttctatagttaggtcgatctactaaattaaatttaaaagaaacctttattataataggcgttattattaaactgattaccaatgttacaacaataagtaataaagtatacatcagttcaccttcaatatattcctgttattttttcatctatactatttaaacaattattatcaattttttaaattagactatagtagtatatatactttttcaattttatatattattagtctgtttattttcttcgtaataatctattcattaaacagaccacttttaatcatgtatcataaactaattaaaattaattgtaaattttttgtaaagatacgtattttttatatcatatcattttgttataaatttgaacatgaaagtctatctgaaattcataatatatattttataacaaacaacttaatgacaaatagtaagttttcacttacaattactaatggttaatttaaaggagtcgatcccaatatgtttgaagcaactatttacaatattgccgttatggtagctggaatttatttattccatcgattacaatattcagaaaataaaatcatgatattttctaaaggttatgtcacaattttaatgactttggtggcattactaataacagcttaccctattccttttcatcatcaatatcttattcgtctaacttttgttccgttactattccttggtcgctatacaaacgtcggttacacttttattgcctcacttatcataagtctagtggatatatttttattcggaaattcatttttttatagcgtcgttcttattataataggtattattgttagtttaattgggccgtttcttaaaaaaaatgatattattgctttaattattttaaatgctatcagtattgttattatttttgttttatctatcttcacaactttatatgatttaactgaattaattatacttatacctatttcattcgtactaacgattacttctgctgttacctttgttgatatctggcatttcttttcgcttgttacacggtacgaaaatgaggataagtatgattatttaacaggtttaggtaatgtaaaagaatttgatagacatttaaataagatttctcaaaaagccgaaatagaacatactagtctcgcacttttactcgttgacattgacggatttaaagatgttaatgatacatatactcataaagcaggagacgctgtactaaaacaaatgtctcaattgcttaaaaattatgtaccacatcaatttaaaatcttccgtaatggcggtgaagaattttctattgtcatcttcgattattctttagatcaaagtgtgaaacttgctgaaaatattaggatggcagtcgaaaaatcttcgttccatttacctaataaggaagttataaaactatctgtatctattggcgttggttatttatctccagatgaatataaatctcaacgtaaagtatttaaagacgccgatgatatggtccatgtagctaaaaaagaaggtcgtaatcaagtaatgtttaatcctataattaaattatagacgttacgatttaatttgagatggaacgtggaattcgaaatgaattctgttgcatctcttttttatactcttttaacatctatattatttatttgttattctacttttaaaatgactgatttagtaataaagtattaatacaagcgaagaatattatagatatacacgaaaaacattatatattttaattattgtgggggtgcttttatgaataattcaatcactattatcgatgaaaataaggtgattgatgttgtattaatagctggtcgcattctcttagaatctggagctgaaacttaccgtgttgaagatactatgaatcgaattgctcacagttatggtttaaatgatacatatagctttgtcacatcgaccgctattattttctcacttaatgatcgaacaaatacaaggcttataagaattagagatcgtactacagatttagaaaaaattgctcttacaaatagtctttctagaaagattgctaaaaatgagctaaccattgatgaagctaaatcagaactgattcatctaagtaaagcttcattacaatattcttttttattgaatttttttgctgcggcaattgcatgtggctttttcttactcatgtttggcggtgttgtttctgattgctggattgctattttagctggcggcgctgcgttcttaacttttagctttgtccagcgtttcattcaaattaaattcttttctgaatttgtagcatcagcagtagtcattacaattgctgttacatttactaaactaggcattgctacaaatcaaaatattataacaatttctagtgttatgcccttagtgcctggaattttaatttgtaacgctattagagatttaatggctggcgagctacttgctggaatgtctcgtggtgtagaagctgcactaacatcattcgctattggtgcaggcgtagcgattgttttattaattctttaagaaaggctgtttatgtatgttattttatctatttcattttgttatcagttttatttcgacggtacttttttctattatatttaatgctcctaaacgacttttgcttgcttgtggatttgtcggcgccttagcttggacaatttatcaatataccgtagatatggatttaggaaaagttggcgctgcttttttaggtagtttaattcttggtttattaagtcatgtgatgagtcgacgctataaaagacccgtgattatcttcattgtgccaggtataatccctcttgttcctggtggtacagcatatgaagcaacacgatttttagtatctaatgactatactcatgctgtgaatacatttctagaggtcacattaatttctggttcaattgcttttgggatattggtagcagaaattctctactatatttacacacgtattaagcaattttatggtaaaatcaaaggaaaaacgtatagaaaatcttacaatatgaacaatagagtctaaggggatgtttcgttatgaaagtacagattatagatagattatcaagatatgtaaaaatagatacacaatcaaatcccgaatcgaaatcgacgccttctactgaaaaacaatgggatttattacatttattacaaaaagaactgcaagactttggattagaaacagaattggataataatggttatctgtttgccactttagaaagtaacatagaaaaagaagttcctacggtcggtttcttagcacatgtagatacctcaccagattttaatgcgacaaatgttaatcctcagattatagaagattataatggtcaacctattaaattaggtcaaacaaatcgagtattaagtcaagatgtatttccagaacttaaaaaattagaaggtcacactctaatgattacagatggtacatctttactcggtgccgatgataaagcaggtgttgtagaaattatggaagcagtaaaatacttgcagactcatccagaaattaaacatggtcgcatacgtatagcttttacacctgatgaagaaataggtcgtggtcctcacaagtttaatgtggaacgctttaatgccgattttgcctatactatggatggcagtgaatttggagaattacaattcgaaagttttaatgcagcagaagcaacaatcactgcccatggtgtaaatgttcatcctggttctgcaaaaaacgtaatggttaatgctattggattagtacatcaattccatagtctactacctgctaatgaagtaccagaacgtacagaaggttatgaaggattctatcatttaatgaaaatagaaggaacagttgaaaaagcttctttacaatatattataagagatcacgatagaaaatcttttgaacttaaaaagaaaaaacttttagaaattcgtgatgatattaatattcattatgaaggttatccagtaaaagtagatatcgaagaccaatactataatatggctgaacaaattaagccacatccgtatattattgatattcctaaaaaagtatttgcagatttagagataaaaccaaatactgcgcctatacgtggtggtactgatggttctcagctttcatttaaaggtttacctacacctaatatttttacaggatgtggaaacttccatggtccatttgaatatgcttctatcgatgtaatggaaaaagcagtacaagtgattattggtattgctcaagaagtaacacaatatgaaaaataataaataaaaaagtttagttcaaagaatgaactaaactttttttatttattttattcccttagctgtagtttttaataatcgtaaagcttgaactgtataatgtctaatttgaagacccattttaaaatctgtgtatgttttcggcatttcaataaatgtattaaacatggctgttacgcgatgatgattaaatatatcaaacttatcattagtcgcacaaattgcaatagatggtttgtgatatttttctgtaagttccgcaatagtcaatgtggttgtttcaagcatatgatcttcttcttttaaaccctctccaaagataattaaatctgcctgagatactaactcatctaaatgtgtaatttgatttactagttcatgactcgttaaaatttctgtgttgtataatgctttcaacaccgcagctataccgccaccggctccgccacgttcaataggtcctaaagcaatatgtaattcatttttcataatctcatttaagtaccaaattaaattatcaatttctactgcttttttgtgtggaatttgatggttatagcttaatttcataatttcactattttttccatacaacttactagaaaaatccgtcatcacttgtagtctgacattttccaatgtactaggcagtccagaaatgtcaatatgacgaatgaacttaatcatttgtgcgccttctcgtgcgtcaagttctctattttcatcatcataaaatttagctcctaaagcttgtagcatccctacgccaccatcaaaactatccataccacctaaagatataataatatgatctgtgtccttgtttaatgcatctaaaataacttctcctaacccaaaactagtacgttgttcaattgctttatgaccttttgaaaataaattactttcaataattacagtaccttcttcagtttgtccatatatcgtttcaatctcattcatatcggcatcatgaacattcactttatattttgtacctgagtgccaaagaaatactgaatttaataattcatgacgtccgttaaataaaggtacctgtacaatatctgcatgatcaatttgacttgctattgcctcttccacataacgattcgcttgataactcgaaataataccgttaaattcatccatggctactaaaattttcattctattttcacctcatgccactttctatctttcttaaattcatacgttataacttcactttcacattatacataggttcatcgcatatttcattttttacattttataaatataaaagtcatttaaagtgataaaaatgtagatataataaagagctggtaacaaaaaatgtaccagactcttaaatcgatatatttatctttcttactcttcagcttgtgctaatgtagatacattaatatcactgtgacttgcattccatacagcttttccatctacaaaataaaaagcttgtggtgattcatgtttcacatttgtcttttcagcaatataatcagaaagttttctttcttcttgaactactagataatatccatctatgtctctttcatataaaaacttattaaattgatcaaatgctgcagctgaaattggacatgtgtcactatgttttaatacaaatacatcgttatgttcttctaatacttgttcaaactggtcaatcgaactcagctttatagccattctattcacctctaaattttttaactttgtccctttttttaaattaaacttctcaatggctacaattatacacatttcatcatataatgttaaccaaaaatttaaatttaggttttattcgttttgctatactttttctaattttgttttaaagttgtgatttcccttacttaaatctttacccgttttaggtagtttctcaacattaatttttgaaagttgatcttcaatcttaatagttgtttcacgtgtctcataataattaagtaaattatagtacatttctatcgcatttttacgagcattgtttacatgtgaatctgtaatattagtctgatttaaatctttaatctgtttttgtatcagtggttttatatgctcattaattgcttttgaagtaggataattatccttttctaaatatttttgagcagtttttcgtaaattacgattattgttttcaattttagattttaatagatgtgcattttcttgattatttgttttacgtatatctttttctactagtgctctatttatttcaaatgaatgtgtataatttagaattttttcattttccacaactgattgattatataaatctacaaatgatttaatttcatttatagattgatgttgcttactcacatgatttaaataatctttctttaattgacgagttttatttgtcttagccggaagatgtttagcttctttttcatactctttaaactcaggcactaaacggtgatttatatttttctgtagtcgttcaaatgactttttatttttatctgttgtatcggttttacttatatcatttaaacggttcagctctaattgattcatcactttttccacgcttttttgcttggtctctactttagataggtgttgtttgaagcgatttaaatcttcgttattattctcaccacaaccagaaagtatcaaacagtatagtgaatataatgaaagtattattaattttttcatttttgcactcctaacacccgtattatacataaagttatttatattgaaaataaattatgttatagtatttcagaatttgtataattatttaattgaaggagttacatatgtatgcatctgttcaatcatttataaattgtaccaacgtcaatgattatcatcagttgtatgaagacactaaagctctgttatttaacttgttagattctccagtaaaattcacacaacatatcgggggaacaaaacatttttcttatcccacagaaccgattttagatgttttagttggagtcaataatctccatgatattacctctcttgatgaaaagagattgaattatgtaggcttttatcgattacaccatccttataaaaagaaagtgatgatggcaaaatttgataatatgatcaatcttaagcaaataatacgattacacattattcaaatagatacgcccttattcactcaatatttagctatagatcacgtactgtctacacaaaaacacgtagcacagatgttttctaatcagaaaaatgaatttatcaatttaaattcaacaatccgatactacgaaaaccaaaaacagaaattttttgataatttgtatcatacactttaatgatatacaaattgttttaaactcttttagcaaaacatatgtaaagttgctataataaagtttagattatagaagagaagaaaggatgtacttatgttagaacaagaagacatcttaaaagatttaaaatctttagtacctgacaatattattaaagttaatgaaccgttaaaacgttatacatacacgaaaactggtggaaatgcagatttttacctttcacctatcgaaaatgaacaagtacaaactatcgtacgttatgctcaagaacatcaattgcctgttacatatttagggaatggttcaaatattattattcgcgaaggcggtatcagaggtattgtgattagtctattatcccttaatcatattaatgtctcagatgatgcaattatagcaggaagcggtgcagcaattatagatgtatcgagagcggcaagagatcacgttcttaccggcttagaatttgcttgtggcattcctggttctgttggtggtgctgtttatatgaatgcaggcgcctatggaggagaaattaaagattgcatcgattatgctttatgtgtaaatgaacacggcgatttgatacaactgactaaagaacaattacatttagactatagaaacagtgtcgttcaaaaacaacatttagtagttcttgaagcagcatttactttagaaccaggtaacttgaacgagattcaagctaaaatggatgattttacagaacgtcgtgaatctaaacaaccacttgaatacccgtcatgcggtagtgtattccaacgtcctccaggtcattttgctggaaaattaattcaagattcaaatcttcaaggtcatcgtattggtggcgtagaagtctcaactaaacatgctggatttatggtaaatgtcgataatggtacagcaacagattacgagaatttaattcatcacgtacaaaaagtcgtgaaagaaaaatttgatgttgaattacatcgtgaagttcgaatcattggcgaatatccaaagtcagagtaaattctcaatgtaaggagatgtgaaacaatgccaaaagtttatggttctctcgtagacaatgaaacacgttgtattcactatcatacattgcttgacattatagcgattaaatttaaatgttgtgaaaagtattatccttgttaccaatgtcataacgaacatgaatctcataacattcagcgttggtcagcagaagaatttcataaaaaggcgatactttgtggagtttgtcaaaatgaactctctattcatgaatacatgatgactgaaacttgtccaagttgccaagcacattttaattcacgttgtaaatttcactatcatttatattttgaaatttaatacttaatttaaatgatatatagaataacatataaaacaaagtattttgacgagactcttgaaggaacggctacagactaaagttgtcccctaacaaagcgagccaaccatacgaagtattgtaaataaagaagccagtaaatgaatttataataaactcatttactggctatttttctaggatgtatgtcccactcttttattcattctaaacttagtatcctagatttattttttagttttatcaattactttttctaactcatcaatttgttttactgttgttgttgttgaacctgaagcaaagtaccataatttagggtctaattcataaacattgttatttttaactgcttttacatctttaataacatcattttttaacacttgtttagctgtcgattttccacccacaactgatccacgatccattgctaaaatgatatctggattatgattactgatatattcattattaatattttgaccatgtggacttattttaacgtgtttatccgctggtttaaagcctagcgtattaaatactaaatcaccaaatcttccacctggaccgaatgtagaaagttctccttcattaactaaaagatacattacagatttatctaaatccttagtttgttttttcatatctgaaattttttgatctaattttgtattcatatcttttgctttatcttctttgttgtaaattttacctagattttctgtattctttttcatatctttaatataatgatcttcacttgcacctacatagacaactttagctttaggcgctgcctttttaaactcatctagatttttctgagtggctgctctacttgaaatataaataacatccggtttagcttcagctattttattgaaatttatttcttttaaattaccagtattaatatatttatcctttttaaattcacttagaaaacttggtaaagattcattattttcaccttttggtaagcctttcactttatcagctacacccatttcttttaaaacatctagtgctccataatctagaataaccgcgttcttaggatttttaggcactttcacagtgttactaatttttttaccctcattactactttcgtcatttccacttgctgaaaagctatttttaattgaaactgtatcttttgaatcattttcattatttgatttattactagaattattactacacgctgataatactaaagctaaagttaagactaaaaataagactgttttcttcatatgtatttctccttttataagttaactttggcactcaatttttcaagtatttacttttatattttctaagcatcacccctttaaatataaaaatatttatctcattttaaaagataacctcatcatagtataaacaaatacgttggcctctaatttcttctacatgaacatccatttcatataaatcacttaacacatttgtttcaatcacactatcttttgggccagatttaataatttcacctttctttagtgcaacaatgtaatctgaataacaagatgcaaaattaatatcgtggagtacaataacaatcgttttatttaaattgcgacacaatgttcgaagtgtctgcataatttgaactgaatgtttcatatctaaattatttaacggttcatctaacaaaatgtattctgtatcttgagcaattgtcatagcaatatacgcacgttgtctttgtcctccagatagtgtttttatatttctatctttgatttcccttagatgtagtaaatcaatggcatatgccactttctcatgatcttcttttttcattcgaccttttgaataaggaaaacgtccaaaatttacaagctgttctacagtgatattcatatcagtatgatttgtttgttttaaaatacttaacttttttgctaattcatcgcttttataatcatcaattaatttattttcaatattaattgtaccgttctcatattcaaataaccgacttactgctgatagaagtgtactttttcctgcaccgtttggacctatcaaagaggttaacttacccttttgtatatcaacatttatatctttcaaaatagatttactctgaatttttttatctaaatttctaatctgaatcaatcttcattcctccttttaataagtaagtatatgaagtaaatacctccaactaaatctataataagactaaattcagtggtagctttaaacatattttctataatccactgagctataaataaactaatccaacttataagaatcgttgcgggtaaaatatatttatgttcatatgttttcatgaattcatgcgctaaattgactgttaataatcctaaaaatgtaacaggacctactaaagcagtagatattgatactaataaagccactaaaattaataaaagttttgtcattttttcatatgatacacctaagttaatagactgatctttccctagtaataacacatctaaataaggtcttaatataaaagcaattacaattaaaataattaaaagtatacttgaaataagaacaagtttagaattagaagcgtcaaaacttgcaaacatcgcactttgaacggttaaaaagtcatctggattcataataagttgaataaatccagtgatactacggaaaaatgttcctaatactaccccaacaagtaaaataaaataaaccgaaaaatgtcctaatttaaacatgccttgaaataatactaaagaaaaaagaaccatcactacgagagttagaagaaaattcaaataagtatttgtcactacactggcttgtgtacctaataagaacacaggcaagactttaataaataaatagactgagtctaatcccataattgaaggagtaagtaatctattcgcagtgatagattggaaaataacaactgccgtactaatagatccaccaacaagtaaaattaaaactaattttcttattcgactttcaaactgatattgaaaaatttcaaaatccaaacctactagtaagtagaaagcagccatgcaaattgtaaaaagaaagagaattaatatttttttattagcactaatttgcataattatttctacctttcatcaataaaactaagaaaataatcgttccaaatactcctattgttaaaccaatatttatttcataagggtaaacaattaatctaccaataatatcggaaaacagtacaaatatagaacctagcattaatgtatgaggtaatgcatttttcaagtggtcgcctctatacattgaaataatattaggaacaattaaacctaaaaatggtaatgttccaactgtcacgactactaatgctgtcaatgttgcagtgattaaaagcgcaatatttataatttgttcatatttaacacctaaattatgactaaaatctttgcccattccagcaatcgtaaagtgattggcaaatatataagcgataattaataaaggaatagctaaatataaaatttcataacggccgcttgtaataacagcaaaattcccattcaaccaattattaatactttgtagtgcattcgttcttaatgctataaaagtggtaaaacttgaaacaatgccaccaatcataatacctaagagcgggacaaaaataacttctttcacttttataaaattgattagtttaacgaataaaaatgttcctcctaggcttaatgcaactgcaaaagtcaatttgatcaatatatgaccttttgggaaaaatatgagtgaaagtaatattcctaattttgcccattccattgttccagctgtagtaggacttacaaatttattttgcatcatctgttgcataactagtcctgctaaagcaagagaacttccagataaaagaatacttatagttctaggaatacgactagaaaataaaatatttttctgattatctgacaaatgaaaaagatcagttattgataattgacttacgccaataaataaagaaagtatacttaatatcactaaaatgattaataatgtataacctttgaatagaaacttcattcgtaatgctccttagtatatataccatttccattgaaaatgattatcatttaactatatattaaattgtcataataaatttttcaatagtaatactaatattcttttattttttatagagaaattaaaaaaactaattgcagtgatgattctacaattagtttttctaaaattagttattattctaatcttcaaaaataaaatcttcgtcttgtaaagcttccacgttaagtgctaatgtatagccgtctccttttactgagaaaaagtcatgattttttgttgatgtatctaatgcgttttcaataataggattaaactctttttcttcaaaataaggttcaaatcctaagtttgataaagctttattcccattatattgtacataatttaaaacatcttcagttaaaccgatatcatcatataacatatgtgtatacgatacctcatttttatatagttcttctaacaacttatacatttctttatcagctttttgtttttcattttctgatagctcattacgtaaactttgagcatctaaaccggtaaaaactccatgaattgattcatcaagtaaaatttttctaataatttcaccagaagttgtcatttttccttgacccgcaagataaagtggataatagaaaccagaatagaacaagaacgtttctaagaaaacacttgaaactcttgccatatattgatcaaaaatagaggcttcttttccccaaagtttatgataattagagataattttatcagatttatattttaaatgaggctcttcaattacccaagtatctaatagataatttgtttcactagatggaagtaacgttgtaaaaatatgtgaataacttttagcatgaatttgttccatcatttgcataaatgaataaactgcttttttacgtaaatccgttgtatgtagcataattaatggcataccatcatccgcttgatgtgtatctaatccagttaaacctgctaaagcacgtttaaacgtatttttttcatcctctgttagtgtcttccaacttgctatatcctttgaaactttaaattctgtttctacccacatttgtgaaatgttttgacgccaaaacatatttgtcatatcttcttgagtattccaattgacggccttcattaataaaatcctcctctatttattaaccattacattatttaagaggataagattaaaatgcttctctatgagaataatttaatctttcctctaaatatttatttcactattaattaaattgcacaacttgtacattcttcaacacttaataatttattacgtgtatagtataaagatttcaatcctttgtgatgtgcgtatacgtataatcgtgacaattcacgtgttgaaatttcagaattaacatataaaattgttgaaatcccttggtccacatgtgtttgaattgttgaaattaaatctataagtttcatttgatcagtattaaatgctgatttatagtaccacattgtttcaggtgataagaaaggcattggataaaatgtttcagcatttccatacgtacgtcgctcaatttgatctacgattggcatgaccgaactagttgcattctgaacatatgaaatactttgagttggtgcaatagctaatcgataagcatgatataaaccatattcttgtacttgttgttgtaatgatttccagtcttctgatgtaggaatttgcatattagcaaataattcttttactttttcaaattgtggcacgaactcttgtgatgtataaaaatcaaaatatttgccacttgcataatctgatttatcaaaatcttgatatgcttctccacgttctttagcaatttccatagaacgttcaattgaataatagttcatcatcataaagaaaatattagcaaaatctttggcttcttcagattcatagccaattttatttttcgctaaatagccatgtaagttcattacgcctaaacctacagaatgtaactcattatttgcttttttcacacctggtgcattttgaatatttgcttcgtcacttactactgttaatgcatccattccagtatgtactgaatctctgaatttacccgtttccattacattcactatgttcaatgaacctaaattacatgaaatatcacgtttaatttcatcttcaattccatagtcattaataatagacgtttcctgtaattggaaaatttcagtacataaattactcattttaatttgaccaatatttgaattcgcatgtactttattcgcattatctttaaacattaaatatggatagcctgattgcagttgtgtttgagcaatcatattcaacatttctcgtgcatcttttttctttttaagaacattaggattagctacaagttcatcataatatttttcaatatcaatatcgtctaatgtcactccatattcttgttttacagtatgaggtgcaaacatataaaagtctttaccttctttagctaaatcaaagaatttagatggaacaataagaccagtggaaattgttgatagacgtaagtcttcatcggcatttacttttttagtatctaagaattcttcaacatcataatggaaaatgtttaaatatactgctccagctccaggacgttgacctaattgatcagcataactaaatccaccctctaatgcttttgctacaggtaatacacctttagctacgcctttaatacctttaattgcttcaccacgtgcacgtaatttagataaattgatagccacgccaccaccaattttacttaattgtttagcagtagaatctatgaaattaattgagtttagactatcatcaacttctagtaaaaaacatgaaacaagctctccacgacgtgcgcgtcctgcatttaaaaatgtaggtgtagcaggttgataacgttgttcaatcatcgctaaaataaattgtttagcttgttctttattaccatctgctaaatatagagcaactatagcaacatgttgattatagtcttctaagtacttagatttatcatttgtttttaaagcataatctttataaaatttgcttgcagacatataactagcaaattcaaaattaatagattttgcgaattcgataatttctattaaatcttcttcgctatacttcttaaatacattaaaataaaaatgattatctactaagtaatgtaaacgttcaatttcgctatcaaaataaattgttttatcgctaatttcttctaagtaaacgtttaaagcttcttgatctttctcaagattaaaaaagccattgtctttacgtttagttacttcattgtttaattcaatatgattgtactttttctcgtccataatcttcattgaaatgccccaccttatctctaaattcgataacatctttatttgtaccttgaacctcaaatttcattaataaaggcacatggtatgtttcagaaattgttcgacctgctttcgcaaagttttgtccccagttacgattaccactagcagcaacagcacgtatataggcatgattaacttctagaaaagactgtacttccttaggaacttcaccaaaaccaattgtacctgtaactaaaatataaggttcttctatactatccttacaattgtctttattgatttctaatacatttttaatttcactacgttttataaatcttcgtacatttcctgaaaaagagaaataaactactttcataggaacgccctctttcgacaatcttattaattaaaaagaagttctcttagtcttataagaaaacttacttttagaacgaatatcatttcgttaacttaatcaagctaatactacatattgtgtttctaattattaatctttaaaaatcattatttgtaaatcgttcatgtaaatagtgtagattccgaaaaaatcaacccaaataagtgtgaaattgctactaaaatgaattattcatacaatctttctattttcctcaaacacaacatattgtgtctcaattcaaaacccaacactatattctgtgtttcattatacataaatgatatcctaattaaaagttaatatttgatgtcaaatgttcgtgaaatcggttaaaggtgcatcatagctatattaaaaactaagaaaattttattttagtttttttaaggtatttcacttgattttttgcctaccattactaaaccttatttattcgggatttccaatacataagaatgtaaatcgtaatatattgttaaccatttattaaaaaaataactcattttttatattaaaagccgaataaatttctattttacgaattaaaaatttagagtatatctaaccatattaagaacatatgttcgttatcattataatttttcttttttatctttgcaagtacttatgcatccacaaataaattatgctaatatatagacgttaaatttttataaatgaggagatatactttgaatcctaaggtaaaaggtatcattgctattttaatttctgctattggttttagttttatgtctgttttttttagactagccggagacttacccgtatttcaaaaatctttagcaagaaatttggtagccatgtttattccattatttttcataataaaatataggcaacctatattgggtaaaatgagtagtcaaccccttttaatgactagatcgacgttaggtcttataggggtattattaaatatttacgctattgatcacatggtgttaagtgatgctgatactttaatgaaacttaaccctttttggactattttattaagtttaatatttttaaaagagaatattaaaaggtatcaaattatagctatgttaattgctatttttggtatgttattcattgttaaaccagaattttcttcaactatgttctcttctttagccggtttattctcaggtatcttcgctgcatctgcatatacttgtgtacgagcattaagtaaacgtgaagcaccttatactattgtattttatttttcattattttcagtcatcgttctgattccattttctattgcaacatatgaaccgatgacaaagttacaaattatatatttattaggagctggattatcagcggcagtaggacaaattggtattacattagcatatagttttgctccagcaaaagacatttctatttttacgtatgcttctatattatttactgcattatttggctttatattattcgaagaaacaccagatttctatgcatttataggttatatcatcattattggcgctagttactttatgtttgaaaaagcacgtagacaatctaatacatctaacaattaggaggcaaattatgacacaaggtcgcaataaagaagaattacaagatattacattattaggcaatcaaaataataaatatgaatttgactatacaccccaagtactcgaaacttttgataataaacatcaaggaagagattattttgtaaaatttaattgtccagaattcacttctctttgccctatcactggacaacccgattttgctacaatttatatttcatatataccaaatataaaaatggtagaatcaaaatcactaaaattatatttatttagttttagaaatcatggtgattttcacgaagattgtatgaatattatcatgaatgacttaattgacttaatggatcctcattatatagaagtatggggtaagttcacgccacgtggaggcatttcaatagatccatatacaaattatggtcgtccaaactctaaatatgaaaagatggccgaacatcgtttaatgaatcacgatatgtatcctgaaaaaatagacaatcgataaaatgtttttaactccttttatttttactaatgtaatataaaaggagtcatttttattctagatttttttaataaactattgcgatttattaaattaaagcgtattttaatattatcgttgaaatttataaagatataggtcttttatttttataagttattatattttatttgactgaaaattctaaaaatttatatttttaagaaattcttgtaaaacttaattgtacaatcttatttacatagtaatcagtcatattaggaaagaaaggagtgggatgttaatggcaacaaataactcccatgaacaaacaattcaatcaataccacagaaaggatttttcggtcatcctaggggattaggtgtgctctttttcgtagagttttgggaaagattcagttactacggtatgcgtgcgatgctcatattttatatgtatttcgcaatacaccagaatggattaggtattgataaaactacagcaatgtcaattatgtcagtatatggagcactgatttacatgtcttctattcctggcgcatggattgctgatagaattacaggcacacgtggtgctactttattaggtgctgtacttattattattggacatatctgtttaagtttaccattcgccttatttggtttattctcatcaatgttctttattattatcggatcaggtttaatgaaacctaatatttcaaatattgtaggtcgtttatatcctgaaaatgatacacgtattgatgcaggtttcgttattttctatatgtctgttaacttaggtgcattaatttcacctatcatactgcaacattttgtagatatacgtaatttccatggtggcttccttcttgcagctattggtatggcattaggtcttgtttggtatttattatttaatagaaaaaatttaggtagtgttggaatgaaacctacgaatccactatctaaagaagaaaagcgtaaatatggaatgattatcggtatcatagtagcaattgtgattgtcgtattattagttacatattatacccatacactttccttcgatttaattagtaatactgtattagttctaggagtagctttaccaatcatttactttacaactatgcttcgtagtaaagacgttaccgatggagaacgttctcgagtaaaagcatttatacctttatttattttaggtatgttattctggtcaattcaagaacaaggttctaacgttttaaatatttatggtttggaacgttctgacatgcaactcaacttatttggttggacaactcgatttggagaagctttgttccaatctatcaatccattatttattttattatttgcaccagttatttctatgatttggttaaaaatgggtaaaaagcaaccttctttagctattaaatttagtattggtacattactagcaggtttatcatacattctaattggattagttggtttaggttatggacatacacaattctcagttaactgagttattttatcatatgtaatctgtgttattggggaactttgtttatcacctacaggtaatagtgctgctgttaaacttgcacctaaagcatttaatgctcaaatgatgagtgtatggctattaacaaatgcttcagcacaagcaattaacggtacattagtaaaattaattaaaccacttggtcaaactaattattttattttcttaggcacagttgctattgttattactcttatcattttagttttctcacctaagattacgaaagctatgaaaggtattcactaattaaatacaaaatagtaaaaaatacttctagttataacatatagaagtattttttacttatatatttaaaattataaaattcagggtaattatttataatataattttaaatgaaagtaggttgaactatggagcaacagtataatcatggggtgttattttaccatgaacatagcggacttaaagatatctatgatggattgggagaagtcgctaaatcactaactcagttatgtaagcatctttcaatacaattaagtgaaaatgaaggtaacattgaaagatattgtaaagaaataaaagaccatacttatagtaatgatatcgatatcgtttttatattgggaggagacggtacagttaacgaattgattaatggtgtaatgaaatatgatctaaaccttcctataggtatcattccaggtggaacatttaacgattttactaaaacattaaacttaaatcctgacttcaaaaaagctagtgaacaattgttgtcttcacatgttgagtcatatgatgttatgaaagtaaatgataattatgtacttaactttgtcgggctaggacttatggtgcaaaatgctgaaaatgttcaagaaggacgcaaagatatctttggaaaattaagctatgttggttccactgtaaaaacactcatgaatcccgaccattttgactatacaatgacagtagacgacaaagaatataaaggaaatacgtctatgctagttatagcaaatggacctaatattggtggcagtcgcattccacttacagatctttctccacaagatggaaaattaaatagttttatatttgaacaacaaagttttagtattttaaacgatattttcaaaaaaagagatagcatgaattggaatgaaattaccgaaggaattaatcatattccaggttctcacataacattacgcactgaaccaactatgaaagtagatattgatggagaaattaatttagaaacacctatcactattgatgtgttacctaaagcaatcaatatccttactttttcgaatgatgagaaataacaactatatcataatcaaaaggtatgtatgattgcttcaagcttcatacatacctttttactttaattgttatttaaaaacattgcttctacatctttccagccattcactcgtttaaaacgtgtttcatttatattatgtgcagccgtaaagataataggttctccttcgaaaatttgaagctgacgaggattatcatctattaaataatctgttttaacaatattttttcttccacaaaaaataaaatgctgtggatctaaaaatggaaaatattctaataaccattcatatttatcatgaaatgaagtgggtacgtccattgccgctgtagcgatatatacatcataatgctcattaagtttttctactacctcttgagcatgtggtatcactttaagatgtctaaaaaactctggcgctcttaaaatatctcttactaacccatcatgttcaggaatcacatggtttaatttgtgaccatttaatgattccattgtaattcctaatttagtttcaatattaactgcttcaataattgcacctaaagtatctgctaatacttcatccatatctattgctatagatttacgtgccatgctatcacttccttagttatcttttgcacattttcaaagtatagcaaaaaacctttaattcgtcatgaatcgtaattaaaggtttttcattagtttaataattaaattgttttaatacttcaatcattttattattttgttcttcaaatccaattgtaatacgtactccattaggaaatggtctagtgatacagccaacgtttagtaattcattatacaatgcttgtggcttatctgttactacaaatacaaagttcgtttgactaggtaaaaagtgtttactttgttcaatgtcataaaacttttcacgttcttttgcattttttttagtaatctcttttaaataatcttgatcctctaatgctgcaatcgctgcatattctgaaattcgtgtcacattaaatggtggacgaatgatattccatttttcaatagcttcatttgttgccacaacatatcctacacgtaaacctgctaatccatatgctttagaaaatgttcttaataaaaatgcattatcaaagcgttcttgtagttttaatgtatcaggataatcttcagcagtgacgaattcgaaatacgcttcatcaattaagactggcacatgacttggaacacgttccaaaaatgactctaattcatcatgactaaaatatgtacctgtaggattattaggattacataaccatactaatgaggtatcagaattaacctcttttaaaatgccttccaaatcaaatccgccattttttaacggtacttttacaacttcagctgattcaacaatcgcattatgataatattgtccaaaagtagcttcacttgtcacaattttatctcctggtgttaaaactgctctagaaatcataagtattacttcatctaaacctgcgccaaataaaattcgagattcatcaacatttaaatgcttactaattgcttttcgtaatgatggagagcctgtttccggatagtagaataactcatctaagtgcgcttcaattgcttcttttacacgaggtgatggtccatataaattttcattcgatgctagtttatataactcaccttctataccaaatttttctttaagtgcttgcggtgataacccaggttgatatgccgataattgttgtagttgttttttcatttatgatcactcctatataaattaagttactttcctttttcacttattaattaaaatagtaccataaattatcgatttatactttatgtgttaaaaagctcatagataaaatgtatctatgagctttttacaaatttaatgtgccaatccttctttttctaaatattgtttagcaactttatatggatcttcatttttcactgtcactttataattcatttcttgcatttgttcatccgtaattttatttgataattgatttaaagcttttttaatttccggatgttcttttagaaacttttctttaaacattggagcaccttgataaggtgggaaaacatgtttatcatctttaagtactaccatatcatattgttttaattcagcatctgtagaatacgcatcaataagattaatgtcgcctttctctactgccgtataacgtagtttaggttccatttgtttaatattagaaagattcaagttatattttttagctactgctttataaccatcatctctatctttaaattccatagtaaatcctggtttaagttgaccttgtactttacgtaaatcaccaattgattgtaaattatattgtttagcaaaatctcttttaacagctaaagcataggtattattatatttcattggtttaagcatcgtcatatcatattttttctctaaacttgctttagcttggtgatatacatcagcttcttttttagattttagatcctctttagtaagttctcctagtactgtacctgtaaattctaagtacccatctatatcgtctgattttaacgcattaaataagaatgaggttttacccataccacttttaacgttaactgtatcatgtgtttcctcttcaattaatattttatacatattcgtaataattgaaggttcagaacctaattttcctgccatagtaatcgttgcactttttttaccaaagagtggaacaacaataacaagtaagataattaatagaataatacctagtgtaataagaagttttttataagataatttcgccatataacgcaatataaaatcaaataaaatagctaataatgcagctggaatagcgccaatcaatataagtgctgtattgttacgatcaatgcctaataagatcaaatcccctaatccacctgctccaattaatgcagctaatgtagcagtaccaataataagcaccatagctgtacgtatacctgccataatgactggcattgcaataggtaactcgactttagttaaacgtcgcattggtttcataccgatacctttggctgcttctgttagagaaggctctacttctttaatacctgtatatgtatttcttaaaataggtaatagcgcatatactactaatgcaataattgctggaacttttcctataccaaaaattggaatcattaatccaagtaaagcaagggatggaatagtttgtaataccgctgcgatattcattacaacttcagataaacgctttgttttagttaaagcaataccaagtggtactgcaattaaaattgcgataaataaagcaataaaagaaatttgtatgtgctcaaaaattgttcttagtaattctcctctacgatcattgagcgttgttaaaaattcgttcatgttttaaccctccttatcatttttagatagatagtcaaaaacatcttctcttcttaataatgactgtgttaaagcatgattattttctacaatgactgcttcatgtttagcaagtatctcgtaaatatcttgaagtttcatactatcttttataattgggtatccttgtttttcgtcatattcagtaagtgttcttgtaagatttagatcggagatttttgaattattgatatctttatgcaagtgatcgcccataaactctcgaacaaattgatttctaggatgctcttggaatccttcaggtgtgtcaatttgttcaacacgaccatcatttaataaacaaatacgatctcctaatttcattgcttcttgtatatcgtgtgttacaaaaataattgtctttttaattttcgtttgtaattctaataaatcatcttgtaatttttctctactaatggggtctaacgcactaaaaggttcgtccattaatattactggaggatcagctgctaatgctcttaccacgcctacacgttgacgttgtcctcccgataattcatctggtttacgatctcggtatgtatttggatctaatctaaccatatctaataattcatctacacgtcgatgaatatctttgtctttccactttttcatttgaggaacttgtgcgatattttctttaatcgtcatatgtggaaataatgcgatttgttgtagtacatatccaatatcccaacgcatctcataaactggataatcactcactggcttctctttaaaataaatgtatccttcacttaacggtattaatcgattaatcatttttaaagtagttgtttttccacaacctgaaggtccgattaaaataaaaaattctccttcattaatcttaaaactcacatcatcaactgcaacattcgttccataacgttttgttacatttttaaactctatcatcttgtcaccttcatttccttcacatcactataaaatttatattgcttattttctattaaatcatgtttattgataaattcatacttaatagatttaaatactaattattttttaacaataaaaaataaaacaacttaaaacatttttctagcttctaagttgttttattaagtcatatttaattttttgttagatattcgttttatatgattggattgtttcaagaaatttaggacaataatgttttaacttatagcttcctacaccatctatcgcaatcatttcttgtttagattctggtttacgtttagcaaactcttctaatgtatagtcagaaaaaatactcacaggcgcaatattcaacttttcacttaattgacggcgaacttctactaattcactatataaaacacgatcaacgccttctattgtattaatgaaaactttttccttacttttatgtttaaatggcgtcgtatacactgtgacatcattattcaataattctttcacactttcatcacacgttagaatttcattatattcatttaaaaagcctttaaaccgtaactcatcaattaaatgacttaactctgaagtagtatagtctttcatcaatccatgtgttgtaagttgatgataatgattgtatttaatataatcactcaattctccacgtaacacttgaataataacatgatagttttcttgttgacgcatgcgtgcgatacaactaataatcatttttgcttcattggtcatgtcataagatttattttgttgaatgcaattactacattgaccgcattcctctagacgcgcattcggttcaaaataatgtacaattgtcgcttctaagcactttttcgttttagtatactgaatcattttagttagtttctcgcccattttatctttataatcatcatctgcttgcgaaacagtaataaaatattcatgtactcctttatctctttcactaaataataaaatacattcactttttaagccatctcgtcctgcacgacccgcttcttgatagtatgattcaagatctccaggcatgttgtaatgaataacataacgaacattagatttatcaatacccattccaaatgcatttgttgcgataacaactttaatacgatcgtatacaaagtcattttgagcttcttctctttctttatttgttaaacctgcatgataaatagcagaagcaatatttatagattctagagattcttgtaattcttctacttgtttacgtgtagaacaataaataatacctgcttgatctttatgagctttagcatattcaataacaaatttttgtctttgatatgtcggatttactttaaaaatgagattacgtcttttggtacttgttttaatttcagcttcttttcggatatttaatttttccataatatcctgttgaacttcggtcgtagctgtagctgtaagagctacaatcgtaaaatcttgaggtagtgtaaacactttgtttatgacgctttgataactaggtctaaaatcatgtccccattttgaaatacagtgagcctcatcaaatgcaattaagttaatatcaatttgactaagcaactttaaaaaatagttactttcaaaacgttcaggtgccacatataaaaattgaatgccttcagtgattaacttattttcaatctcagattgttgttttttatttaaactactatttagataggctgcttcgatacccattgcttttaactgatccacttggtctttcattaaagaaatcaatggacttattactatcgttgtaccacctaacattaaaccaggcacttgataacatattgatttaccaccacctgtaggcaagacacctaatacattatgatgatttaatattttagaaattatctctttttgacctggtctaaacgtatcataaccaaaataatgtgacaaagttgcttccatacttacattccccttattgctcttttatttcttctaattcactccatctcgtgatgtctacatcatatgactgctctagatgttctttttcttcatttaattcttttattttagcgtagtcagcgctcgcttctaccatttcaacatcaatctgctctagtctatgttctgtcgtttcaatacgttccattagggcttcatattcacgtttttctttataagacagtcccgtctttttacgaacgtttgatttagttttaggttgttgagcttgtttttcaagtgtatcctgtcgatctttttcttttttataggcctcataatcttcgaatgttccaataatacgttctaattggccatcgtgaatataccaatattcttgtgctactttatttaaaaaataacgatcatgacttacagtaactactgaccctccgaatgtactaatgtagtcttctaaaattgttaatgtttcagtatcaagatcattggttggctcatcaagtaacagaacattaggttgatgaacaagcaatttcaataaatataatcgtttttgctctccacctgataatttataaatctttttaccatgagcagcactcggaaatagaaatcgctctaacaattgagtaactgaaactgaagtaccatctttttcttttgccacttcactttcttctctcaaatagtcaatcatacgtatatctctatccaaagtttcttctgtttgtttaaaataagctatttttacagtttgaccaacttttaattctccagaataatcagtatcatcttgatttaaaatatttaacattgtcgtcttccctgcaccatttgggccaacaataccaattctttgaccactttgaatgatttctgttacatctttgaataatattttattttgaatctttttcgttaaatgatctaactcaaatacttgtttgcctaatctagaataagcaagattgagttgacctttatctttttgatgatgagattgaacttctgtctctaaatcattaaatcggttaattcgagcttgttgttttgtcgttcttgcttttgcgcctgtacgcatccacgcaagttcttgtttataaagtgctttttgcttttcttgttgtttttgttcaatcacttcattttcagctctcattgcaatgtaatcttcatagtttcctggataagatttaagttttcctctatctaattccacaatacgtgtagcaatctcatttaaaaaatagcgatcatgtgtcacaaataaaactgtatgtggatattgcttaacatagttaattaaccaattaattgattcaaagtctaaatggtttgtaggctcatctaacaataacaaatcaggttgttcaataagcgtcttagctaagacaacacgtttttgttgtccccctgataattctttaacttttttagtcgtattattaatacctaattttgataaaatagttttaatttcagcattgtaatcccatgcatggtgttgatccataagttcttgagcttccatcatttttttaaaattcgcatcgttttgatgttctgtatatatagtcacagcttcttcatatgttttaataatacgtaaagtatctgtatcggaacttagaatagcttgaaatactgtcatatcaccatttaaatgttgcttctgtgaagaataacgaatgcgatactgattaggatgagttatatcggctgaaaaatcttcatctaaactaccaatgacttttaataaagtacttttaccagtaccatttatacctacaagtccaattttttcatgttcagaaatagagagatttaagtcatcaaaaataactttatcagcatatgatttatttagttgttctattttatacgcttccatatttttacttcctttttaatatcgaaatttcaatatatttctgataagcttaattcagttctatatattatacacctttttaatgctaaatgatataaggagaaaatagatatgatagactttttcgaaaatttaccaccttatcttcaagcacttattgccggtattattacttggttattaaccgctttaggtgctgcatcagtctttatttttaagactgtaaacaaaaaaattctaacttctatgcaaggttttgccgctggaattatgattgctgcaagtttttggtctttattacaaccttccattgattatggtacaaatggtcatttacctgcttggttacctgctgcgattggttttattctaggtggtgtgtttattagaggacttgatgcagtcattccacatatacaccaaaaaatcggtgataaaagtcaatatcgagaaggcgttaaaacttctttaagtaaaaatgctttactagtattagctatcactttacacaatattcctgaaggtttatcaattggtgtagcatttggtggaattgcaactggaaatggacaagctaccttttttggagcccttggtttagcaattggtattggtattcagaatattccagaaggagctgctttgtccatgccgattagagccgctggtgcaacacgttttaaagcatttaattatggtcaagcatcagcaatagtagaacctatttttgcaactataggtgccattgcaattatttttatcactccagtactaccttatgcattagcttttgcagcaggagcaatgatttttgtagttgtagaagagcttattcctgattctcaatcgggtaataatacagatttagctacattaagcttaatgcttggttttgtaataatgatgatattagacgtatcattaggataattaaattaaagaataagcctgagacataataaattgttttaggcgttttttatatattggcagtcaattctagtctcggaactccaacataaaaattttcaataagaaagtctacgtctaacgcaagttaagaatacgttgccacaataaaacgacgaattcaaaatgaattctgtcacactccctttcttttttgtttatttttaatgcaactataaaaaacccgtagataaaacttatctacgggcatttaatatagaatgtttattttacacactctctaatattgaattatttttgatttccataaggacctattttgtagtcatattttgacggattaatttttttgaaatctggattattgtagaatctgaataggtcaccatttaatacgtcgtcactcatttctaaatctttttccacctgtttcttatttttttctaaatctttaggtggcgttgttattaattcattatttttatttgaatatactttaccattcacaaatttataatcttttgtgatgaaatcaccattacggaatggaatcacatcattatgatctttagataacatatctgtacccaacattaaataattcttcgagtcaataccaactaaatgtaaaatagtaggcataacatccacttgtccagcatatgtttcatctacagtcccatttttaccaggaatttttaaccagaagccagtacgatttaaatctgtgaatttagctggtgtaatttgctcacccagtaatttttccattgcattgttatggttttcagaaataccataatggtcaccgtaaatcataataactgaatcatcatataatcctttagttttcaaatcattaatatactgttctaaagcttgatctaagtaatgcgccgtttgaatatatccatctacagtagaatcgcctgtattcggcttatcaatacttgcatcttctgaatttaaagtaaatggataatggttagttaatgtaattaaatgggaataaaaaggttgtttcattttagattgatattctgctgatgctttaaagaaaggtttatcttttaaccctaagttcacgacattttcatccgacatatcgtaatatgttgcatcgtaaaatttatctataccaaaatgtttataaatttgatcacggttccaaaatgttttgtaatccccgtgcataacatcagaagtgtaaccttctttttgatctaaaattgctggtaaagattgatatgtgttatctccttttaatgaatacgcagatccttgaggtaaaccatataaactattatccattgtaaattctgaatcagaagttttaccttgtcctgtttgatggaagaagtttggataatatctaaagtcatcgttaccagtcgataatttatttaagaaaggtgtaacttccttaccatttacttttttattaattaaaaatgtttgaaaactttccaaatgtatttttatgatatttttcttcttagcaataccataatattcagggtttggttccgtatttttttgtttcgtataatttaaaacacgagttaaatcatcttcagaagccaatgctttttgttgattgttttgaatcgttttaacaccatcatatacagtaaaattatatggtcctaaatatttaactaaatatttgtgatcaaatgtacgagttaataattcaggtcgatcagtttcagcaaaagctaagtttaaaaagaacaatgcaattgatgctgccatcactactggtacaaactttttactaaatacacgtttgtctaaccaacttcgtttaaaaattaaaataaacagatatacaatcgtatctaagaaatacacaaagtcataccatttaaaagaggcacttactgcgccccccatcgattcaacgttactcgcttgatttaatgtactaaacgttaaaaagtctgagaagaacctaaaataaacaacattagcatagagtaaaaatgttaataagaatcctccaataaaaataaaccaatatgctttcttacctttaaagaacaaaaagatacttaaaataagcgcgattaaactatatggattcatcaatagtattaaattttgaactaatcctttaacacctaaagaaaaatctacatagtatgagaaatacgttttcaaggttactgtaaatacagtcattaagaaaaacgcaaaaagacttatttttcttttgtgtaaactcatgaatgtttcctccgtttatagttattcaaatacggccatttacaaatgctatttttaaaatttaatatattttaaaaacaataaaatttttaattatcatttaataaaagaacattttttatcactacatttaattgttaactatttattaaaaaaatacgaattttgtaatatttttgtaataatacttcatagttcaatatataaatataaagtatttttacttatttatcaagaaaaagctcaagttcagccttcccatttatatacctaatcatttctaaactgttaaactgattgatatattataacgcctaatctattcaatttaatcagactatagtcctatacctttacattaaaaaatatcattaaaatattaatgttcaatattttgatgatatttttattttaacatttctaattgcattcgaaattcgataccatgaaataattgattcgtccaattactaaacttcacagtatttttttcagccgtttcaatatctataaattgaaatttcaaacgagatccttgtggtttttgagctagtttagtcaaatgatagcttgctatagtacctatttgtggataacttccaatagtataatgatcatttaataaaataataggtgtaccatcacgttttacttgaatagtgcccttttttactggttgatactcaggcatatcttcataataggctttgatactaggaccctctagtaacatccctacacgattagacttattcgttactttgtactctccatgtacaaatgtttgttgtgtatcagtatcaaaatcatttgttcctttattagcaatgacatgaaatacatcagaaacgtaattaaacgataaagcataaccatcaattccccaacttgttgttcgctgatgtgctaaattttcaaaaagtttacgatgtcgtgatgtataatcacgtttcatttcaatttcctcgccttcttgaattgttctcccctgaaatcctccaacaccaatatttaaatctgttgaagttgaatttaaccaagaatctaatttaaatcctcctccaatagctaaataaacacgggatgttgtactcgtttctttgaaagacaatacttctcctttttctactaaatacaatttataaggtttaattttcatattttctgtacacgcttcaaagtgatgacctgttaaggcaattaaagtaggctctgtgaatctaattttcgccataatatgtgtcatttctaaagttgcttcgtttttatcatttgctacaagacgattcgcaatttcatgtcctaatgtatctaatgcaccgccagggatgactccctcatattcatacccttggcgtccaaagtcttggaacgtgctaaaaagtccaggtttttctattatgattgacattatttaaaatctcctaattcagtatcatttgggtttttaggatgaaataagacattatctcctaattttaataaattaaagtgatcgcgctctggtgaaaataatttaattggggtatagccaatgactaaccaatcgttataagtatctgtcgttacaatgccacattttttcccttcaataatgacagaacctgcaggcactctttttttcttctgacttgtatgattaacatataatttttcattcattcctgttaaataaggaaagcctggggagtatcccatcatagagacaaagtaatgtgattttgaatgaagttgaataaattcctctttagatagacgatagtattttaatagagcctctaaatcaggtccaaattgatcaccataaaccacaggaatattatgaaaatgacacgctgtttgtttattttcgatatgttctaattcaatttgaattgaatttacaagtgccttcatatattgaaatggcgatgaaatattataatgcttaatcatatctcgagcatcataacaaatcatcatactagactctgtaggtacaatatcagtgatgaaaggtaagtctttatttaataaatgtgtacgtacagcaattaaatttttagttacatcttcagcgacttcttgttcaatatctataataatcgcttggtctccttgactataaattttcattattgcacctcttattacattctaaattatttgaatctatcttattgatgataaaataaatttaataaatgcgtagcatatggcatgatggattgaattaaaagatatactagtacaaattgaaacaacacagtcattgttcctacaatacgcggtagcataattagattatgcttcaaatatcgattgattatatatttacttaaactattgagtaatacgataagtattaaccataataatgtcataaccttctccattattaactaaattaaatttcacaatatctatcaattgtattttatatataaatagatacctgagcaacttcacgtagactattcagtaaataaacttctacttcttcattttccagtttgatcattaattcatctttagtataatctttcaccttaagtttatgattttctaataaactttctctcatacatcctcgtaaaaaatctttattatatcgtggcgtataatagtttccattttctttaatcataatatttccaatatcaaattctaaaattttgccactatcatcatacagtagtatcaaatctgtttcatgattatgcgttaaatatgctctttctgttgttttatttataatgaatttttgtggataatcactgttagattttttaaaacgtgcagtaaaaatgtctttagaagataatggctgaataacgtgagtgaattgtccatctttatcaatttctactttcaaacgatataagcggtcattataattttgttttaaattttcaatataactataccaagcattctctgaaaactgaaaacctaattgtgaacaagaatgacatagtcgacgcgtatgatagtttaaccttggtatatgaccatgattaagttgcattgtttcaaataatttcaatcataactcctccaatattttggttttgtctcgaaattcttgaatttcatttaatggaacagaatcaatggtaattcccgcacctacaccgtaaagagccatattatttcgatattctactgttctaattggaatgttaaaaatcattttatcatctggtaacaataaacctattgtgccgcaataaatatatcttggactggtttctaagtgtttgatataagtcattgtactttgtttaggcgcaccagtgatcgatccacatggaaacattgctgttaaaatcgaatgaagagatatagcatcttctagttgccctgttaccatacttgtcatttgatatacggtttgatacgtttcaataaagaacaatttataaacctcgatggttccagtttttgaaatccttgacatatcattacgtaataaatcaacaatcattacattttctgctctatctttatgagaatacattaatttttcataattcaactgatcttctacactagttttcccacgtggcattgttcctttcatcggcttactaacaatcacgtttgctttatcgttaaatgtacctttttgaaaaaataactctggagaaattgacgcaacttttacttcttcagtatctaataaagctgtatagccaccgttattgttgtgagtcaaataggtatataacattgaaataggataatgcactttactggataaacgagtagtatagttaacttgataagtatctccttctgtaatagcttcttgtattttaataatttttcttctcatttgttcgtcactttcttggaattgaaagtgatgtactgaatgatattgtatattgtccttattattatcagagtttaagggttgattaaaagcgtatgcagcagcatatacttctttttctattaagtgatacgtttctaattgattattaaaaaatggcgctgattcataagttaaatataacgctacataatgcccctttgtctgttgttcttcagcaaattgaataacttcacctacttcttctaaagaataggcaattgattttgaaatatattgatcaaatcgcaattgataatcgatgtagtcatcttcgttagtataataacggtaattaaacgtaatattcatgtatttttcctactttctctataaagtattgaatctgctgatgaccatattcacttaatatagattcaggatgatactgtactgcaaaaataggtagggtatcatgttcaaatgccatcataataccttcattatttgtagctgtagtatttaattgagaaggtaattgttgcctattagcaattaaggaatgataacgcatgacattaaaattttgaggtaaatgtttgaaaagtcctttgcctgtatggattataggtgttgtatgaccatgaacaggctttggtccatgaataatttctcctccataatattcatagatgagttgaaaccctaaacagatacctaatataggtaccgatgaggcatatctatctaaaacgctttttaaaattggatagtcacttggttttcccggacctggagagatgacaatagcctcaattgttaattcttcaagtaatgctacagtcacttctgttacctttaatacctctacacaatgagaggtttctatttttatgtaatcaatcaagttatatgtaaatgaatcattattatctatgactataatcataattatttccaaccttcaaaataatatatttaaaatacaatttttatataagcgcttactttaatattctataaattagcacttgattttaagatatgaatatattaagctatctatcgtataattcgaatataaagaggttcctagctgaaaccctctataaaaaactagacctttgtagaaatatttatacatactttttaatgtacatatgttctacatattttaagtctatctttttatagagataggctttttttatattttatatcaaatgttttcattctatttcatcataaattaaaaatattaacttttaaaggagaaacgttatgccaaacagtgttttgaattctgaaaaagcaattgttgtgtttagtggtggtcaagatagtacaacctgtcttttctatgccaaaagacattttaaagaagttgaacttgtcacattcaattatgggcaaagacataatacagaaatcgaagtagcttctaaaatagcaaaagatcaagggttgaaacatcatattttagacatgtctttactatcccaacttactccaaatgcattaacaaaacatgacatgacaattgagacaggggaagatggtataccaaatacttttgtacctgctcgtaatttattatttttatcatttgctggggctcttgcctatcaagtgaatgcgaaacacatcattactggtgtatgtgaaacagacttctctggttacccagattgccgagatagttttattaaatctatgaatgtcacacttagtttatctatggatagagattttgttattcatacacctttaatgtggttagataaagcgcaaacttgggaactcagtgatgaattaggtgttctcaattatgtgcgtcacaatacgcttacatgctacaacggtattattggagatggatgcggaaaatgtccagcttgtaaattaagacaacgtggacttcatcaatatttagaacaaaaaggagatgcgtcattatgatacaacaagtttatcctacagtgaatcacccttatacatttgaattaaataaagatttcaatttttcagcagcacattttattcctagtgaagatgctggaaaatgcatgagaacacatggacatacttattttgttaacttaactattgttggagatgcactcgaccataatggatttttaattaattttagggaattaaaacgattggtccatgaccaatttgatcactatttattaaatgagttacctcaatttaaagataaaagtccttctactgaaattgtggcacagacaatttttgaaatcgtacaagctcatcttaacgagtatgacaataaacctaaatgtgtacaagtttatttacgtgaaacaccatcaagttatgttgtctatcgtccaaaggagattaaataatgccttcaaaaataccagttttagaaattttcggacctactattcaaggagaaggacgagttataggacgaaaaacaatgtttgtccgcacagcaggatgcgattatcgttgtagttggtgcgattccgcctttacgtgggatggtagcgctaaagatgatatagagttattaactgctcaagacatttatgatcgtttaaaagaaattggcggtaatcaatttgatcatgtcactatttctggaggtaaccctgcattaatcaaagggattcaagatttagtagatttatttgaagaaaaaaatatttttacggcattagaaacccaaggcagtaaatttcaaccttggatgcgacaaattaacgatttaacaattagtcctaaaccgccaagctctaatatggtgcctaatttagaaatattagatagtgtcatagaacaatgtataccatcaacattgaacttgaaagtagttgtttttgataaagaagattatcaatttgctaaaatgattcatcatcgttatcctaatattccattttatttgcaagtaggaaatccctatttagatgatgatgttgaatatcataccgaaaaattacttggtcgctatgaaactcttgtagacacagtaatgaatagcagtgatatgaatcatgtgtatgttttacctcagttacatacattgttatggagtaataagaaaggtgtataattagtaaattataatagaataatatttattaagtgttttgaaatgattaagtttattttaattgctataatattttaatgaactacacacacgtgataggagtacaacatgattatatatgtatttattaatatagccattaccatatgtgttctgggctttgatttatatcggcatcatttcaaacaactaacgtttaactccgttctattatccattgttatcaatgctattattaatagtgttgtgattgaaaagttcaattttataacatttgcttcaattatatttttcttaagttggacaatcttacaatattatttaaatcgtaaacatatatacttaatgatttcagagtataaatctcttgcattcatttttgcaattatgattagttgctcattatttatcacttttgaatctagcgaccaatcagtctatatgtctattccttatttagctccagctatatttatcataggcttaagcattgatttcataagtactttttcaaaaaatgaaatgaatcatcttaaatttttgagtaagctacaacaccctattatgattggtcatacaattattattatttcaattatacttttgactttattaacatcattttggtatatcttcataattatttatgctttatttgatatatatttattatggcaactaaaacataataattttgaaaatgacttaaaaaaataaacatgtaagaagctatgatgtaagagcttttacatgtttatttttttattgataaattttttctttttctgcaactactttttcaataggtgtttttaaattggaagcttccacaatatattttggtctttgttttacttcgtaataaattcgcccaatatattcgccaacgacaccaatagacattaactgaatgccacctaataacaatacagctgctattgttgtaaagtaacctggatgattaattccattcattaaaatacctattaacaaataaataatataaatgatgcttaatccaaagataaacattccaagatatatcattgctctcagtggtttattattaaatgatattaatccatcaatcccataatttaataacttggtaaatgtccatttagattctccagcttctcgttctacatttttataagtaaagatctttgtattataccctatccattcaaataatcctttagaaaatcgattatattcatttaatgaaacaatcgatttaactgcacgttgacttaataatcgaaaatcgcctacaccatcactaaatttaatatcttcgacaaagctattaatgagcttatagtacaactttgacaatgttttacgtgcaatattttcaccactacgatctcgtttagcgacaacttgatcaaaaccttgttgatatatttcaatcattttaggtataaattccggaggatgttgtaaatctccatcaatcattacgactgcatcaacattcacactgtgttgaaaaccagcaatcattgctgcttctttaccaaaatttcgactaaaagaaatatatttaacatgttcatcgtattccgctaaattttgtatatgctcaatcgtattatctttactaccatcatcaataaataacaagtcataataataacgacgagttttactattctccgtcaaaatttcagtcaatctatcgtaagttttttttacgactttaccttcattgaagcaaggtataatgactctgattttcatctaattacatccttttctacattctttctaatattgtatcaataaaatcaataaatattctactaataaccatgtaattaacaaataattaatattaactctagcttttgtaataattaaactatattattttaaatcacctattgctacatcatctggatctttaccttgacgtgcatttctatttaaactatcaatttctgcaatctcagtaagttctaaattaaagtcaaaaatatcaaaattttcacgaatacgagatggcgtttttgatttaggaataataattctgtcatgagctagatgccaacgtaatacaatttgtgctggtgttttgtcatattgttctgctaattttgtaattactggatcatctaataatccacgatttctcataagtggcatccaagctgtgacagtaatatcatgtttatcacaataatcttgtacatcttgttgattaaaataaggatgaacttctatttgattaatttgaggtacaatagttgtctctttcatcaaagtttctaagtgatagggtttaaagttacatacaccaatcgctttaattttaccttcgttatataatttttctaatgctttataagattcaatatataagccatctttttcacatggccaatgaattaaatataaatctaagtaatccaatcctaagttttctaaagatttattaaaatattctaatgtattgtcatatccttgataatcattccataatttagaagtaataaatacatcttctctcgcaatatcactgttgtttaaagctttacctagcgcttgttcattaccgtaaaaatatgcagtatcaaatgcacgatatcccgcttctaatgctatttgtactgcggtttccatctcattatcttccattttataaacacctagtcctactttaggcattgggtaaccattatttaacacttgtgtatcatttaccatttgtgccacatcctattcaatataaatttctcaactaaaaattagcataacttaatttcttttacgcatacaaataaagacaattaggtttacatacccaagtgcctttattttattcatccgattcatttttatgatcgtgattttcttcttcctcttcatcactaatcacaggtcttgtttcattaaattggtatttaagtacaacccataccaattgatgattatccatttcagaaacaatccatcgatcatattttgtatctatatagtcttcaacttgaagattagtattgtgtgcttgtagccatccaccaattgtatcgatatcttcagaatcttcaaaagtgatatcaaatttttcatgtaaatcatcaagtaagacacgtccgttaatttgatatataccttcctctaatttaacaatatcatttatttcatcatcatcaaattcatctctgatttcaccaacaatctcttcaagaatatcttccattgttagaataccagcagtaccaccatattcgtcaataataagactaatatgaacatgttcacgttgcattgaaactaatgcatcgctaatacgagttgtttctgaaatcataggtagttcatgaatataattagagattttaattgttttacctgaagcatattctgttaaaaattctttcacattaataaaaccttttatatggtctttatccccatcttcagtaattggataacgtgtaaattgatgttctttaatcgtgtcaagtaattcgtcaacattaaatggttcgtttaacgttaccatttgtgtacgtggaaccatgatatctttcgcatgtctttcgtcaaatgaaaagatattttgcatgtaattcagttctgtttgattaatttctccaccattataactattattaataatgattttaatttcttcctcagacattgcatctgcttgcgcatcagggtcaacaccaagcattctaataattactcgtgccgaaccattcattaaccatattaatggcttcatgatattaccaaaataatataatggtctagcataagttaatgctaatttttcagtatgttgtattgctattgatttaggtgctaactcacctaacactacatgtaaataagttacaacaataaacgaaatcacaaatgaaatggttgtagtcactgcacttggcaaatgtaatagattaaaaagtggatgtaatagtttttcgaatgtcggttcacctaaccaacctaaacctaaagatgtaactgtaataccaagttgacatgctgataaataataatcaagattagcaatcatctttttaacaatttttgcacttccattaccttcatcagcaagttgttcaattcttgttgaacgtacttttactaatgcaaattcagatccaacgaatacggttgttaaagcgattaatagaaaaaatattactaaattaattatggtcactgtttccaattagttccctatttctagggattcacctccaaatattatgtgtctctaatgagtaacacgaatttaatacgtcatacttatcaccgttataaacgcatgttaagaccttcccattaagacacccccaaaaaaaatgtattactttaatattaccatatttctatactaaatggttaaataagaataagaaagcttttaacatttaaaatcatttaaaaagcattatataatgattttcttactactatttcatatatacttcaatagtccttgtaataaatttttaagaaaatcagagaaatgatatgtgaggaatttttaattaaatgctataaaagtacaataatactccaggatggttatttgtttcttaaactcaaattctcatttaaacctaatctgtagtaatagtcaagtacatatatatctatgtctttttaattatatactaactatataataaaagattggacagaattcgttaatcccttcgataatgtaaacccagctttcgttgagcgttgggtttctcaggaaaccctttttgctgaggccccaaccccagctttcgttgaacattgggtttcctagaaaaccctttttgttggcactccaccccaaatttctttgaacattgcttttttacaaagatttcgatgctagtactccttgaaataatcttgatacaacacgttttcaattcaatgaccaaatatcaatatataaaaaaatgcctgagacaactcattatgtctcaggctcattaaattaatgtttattattcatccatagattctgaagctttaatttcttgttctgttaattttggtttcagtaaaccataaagtactgctgaaacaagtgtacctataattaaagcaatgatagtttggataatatgactaaagtctgtggctgctataacgatgataccaccatgaggtgcattaattcttgaaccaagtcctaatgcaatcgctccagcaacacctgaaccgaccatcattgatggaatcacacgtaatgggtcagcagctgcaaaaggtatagcaccttctgtgatgaatgatagacccataacatagttaggtacgattgagccacgttgctcttttgtaaatttacgtttaaagataaacattgctgtggcaattgctaatggtggaatcataccaccaaccattgctgctgttattggtgcagcattaccttcagttaaagctgctgtcgcaaatacataagctgctttattgaatggacctcccatatcaattgccatcatagctccaataactagtcctaatagcataatgttagaaccagataaactatttaaaccatttaataatagattgtttaaccatgctgcaggtggattaaatacataaatcattaataatccagtaattgtcacacttaatagtggataaattaatgttggttttaaaccttcaactgcttgaggtaaattacgagtaatatatttgataccttgtgttaaataacccgctaagaaaccagcaataataccaccgataaacccagagccaccagaaattgctaacataccgccaactaagccagctgcaaaacctggtttatctgcaatactacgagaaatgaaaccagctaagattggaataattaatgcaaaggcactcttattaccaatattccacaattgttctgcaaacgcattgtgttcaggactttttggatcaaatgagttggcgccaaataagaatacaatcgccattaatataccaccagcaataacaagtggtaacatattagaaacaccattcattaagtgtttataaaatgctttacctggacttaatttttcatcattactatctttatctgtatttttttgtccaccatgtgctttaaatggttttctacttgtatcaagtgctgtattaattaactcttcaggacgtttaatcccgtctgctactggaacctcaattacatttttaccatcgaaacgatctgtttctacatgaacatcggcagctacaataatcccagttgcacgttcaatatcttgttgagttaaatggtttttaataccacttgaaccatttgtttcaacttttattttcactcccattttttctgcttgttttttcaaagcatcacgggccatatacgtatgtgcaatacctgttggacacgctgttacagctaaaacataaggttcgttagcattataattcgctgatgcgccagttgttgtttgtgcttcagtctcttgttcttgagcttctttttcttcttctttagttgcttcatcatcagcatcatcaataatacgaagtatttcttctttcgaattagcctgtaatagattttctcttactgtatcgtccattaaaatgcctgacaatttagctaatgcatctaaatgtgtttgtgcgccaccctctggtgctgcaatcataaagaataaatgcgcaggttgaccatctaaactttgatagtccacaccttcttttgatttaccaaaagcaatcgcaggtgatgtcactgctgctactttagcatgtggaatggctattccttcaccaattcccgttgtactttgtgactcacgattatgaatcgcttccttaaattgagctatatcgcttaatttaccagctgaatctaattgattaactaattcatcaatgacgccgtttttatcactagctgataaatccatagcaatagtttctttagtaagtaattctgttattctcatctctatcactccccatcaagtacagaaattgtaacttgtgacttgattttttctatatcttctcttaatgctaagtcatcattaaatgccgtagccgtacctgaagctactgcttggcaaaatgcttcttcaagtgatagtcccaactcaagacccgctaccatacctgcaactgtactgtcaccagatcctactgtatttacaacttcacctttaggattttgggctttaatacttcttgtctcgtcaacatatatggcaccatctccacctaaagaaataatgacagattgagctccattttttactatttctctaccatacttaacgacatcttgatctgatttaattgtgacatcaaacatttcttctaattcatctttattcggtttaataaataaaggatgatattctaacactgtattaactaaatctctttcagcatccactactaattttgcacctgtttcttgagtgatttttgcaatttgagcataagcatcactcggaatactttttggaacacttcctgctacaatgacagtgtcctccttagaagtatgtctgatctgatttaataatgcttcaaactgctcagacgtcacattcggaccaggtgcattaatttcagtttcatcgccggattttaatttaacattaatacgagtatcttcatttactttaataaactccgtattaatatcgctttgttccaaaatgctagaaataaattccccaggaaaacctccagcaaatcctaatgccgtagatgaaacatctaaggttttcaacacgcgagaaacattaataccttttccaccagcaaatttgtatgtttctctagctctattaagcccttttagctcaaatccatcagtaaacatgatgtaatcaatagatggattaaatgtcactgtatatatcataattaacctcctaaaaagtggtatttctctttgtattcgttgtagcgattatgatgacgtaattgctcagatacgatgtactcaacatggcatgctttggttgagacatgcgcaaaatatgtttcatctaattttgaatggtctaataaaacataagatgtggttgcttgatgtattgctctttctttaattaatgcttctttttcatctggtgtggttaatccatgattcaaatctaagccattcatacctatgaaagctttatcaaaacaataacgtcttaaaacttcaagggcacttgctccgacagtagcaaaagtggtagcttttacttctccaccaatcatcaaggttttaatacctcgatgaagtaatctttcaacgtgagacaatccgtttgtaaccactacgatatcttgtgcttttataaatggaatcatctcaattgtagatgaacctgcatccataaaaatacaatcattatcttcaatgagctgagctgcctttcttccaatttctcttttttcttttagatttgtagacagtttttcagataaaataggttcttggtttctatgactattaagtgttgcaccaccatgaacgcgttgaagacgtccaagttgttgtaactttgataaatctcttcttatagttgaagcactacaacctgttcgttcaattaactcttggagtgataaaaaatcttttttcttaagttcttgtaaaattaaactttgtcgtttttcagaaatcatctttaacactcctttacaacttttattatagtgtttacgcttacatatttcaatcaaaaattatcaaaaacgttcaaaaacgttcaaaaaaccgaaaaattaacagagtgttcacaatgtatatcattgctcactctgctaatacatttaatgttgagtaatacgtgctgtttgtgcctgtgtaactgcaattaaatcattaggttcaagtataatttgcatgcctcgttgaccaccactcacattgattttgtctcgtgataaagctgactcatcaataatcgttggaaacgaatgtttcatccctattggagaacaccctcctcttatatagccagtaactttttttaaatcatccatcggcatcaaattaagtttcttttcacctatgacatgtgccgcttcttttaagtctaatgtttcactaactggtataacacatacaaaatgatcatgattagcattttctaacactaacgttttataaacgtctttcacattcgcatgcactaattccgcaattgtttctccatctaaatgttcttcacctatttcaaatgtatttactgaataattaatcttagctctatcaagcattctcattgcattggttttcttatgtttcaatgtaacacctcatttatcttctttatatatctaattttactactcattgtgacaaataaaaaatagagtaagatagaaacctttagatttcactttcttactctgattttacattacatttttatttaacttaatttgcagaaattatctcaactttacccactttattaattgttatatcttcagcttttttgttttctggatacgcttcaaaagtgatggcttgattagtttcattcaaacgctctaactttacaggctgtttataattttgttgcatataattttcaattatcgttttacattcctctgttgagtataaatatttttcttgagctttctcatttaacctataattaacgttttgattttgacgaatatctgctttgtgttgcgtttgatttttctcagaagcttcggcggtgtgattgctgtttatatttaatatatttttagtttcgacaatacttccgacttttgaaaaagtagaaattgttcgatgtaccttagctaaggcattttgattcgttgcgataaataatagaaatgccaaacaaattgataaaatgatagctaccacacttaacaatatattttttaaattcatctccttacccacacttctctttgaatttttttatatcttaacatacaaatatagataaaataattcagtagaaggcaatttaaaataattgtaatctttgtaacagttatattacctaacgactttttattgttacatttctattatataaaacttatttaatcacatctgctacgatttaactttaactttttctctatgaaaataattactaccccaaataacattacaataatagacatatataaaggaaattcaatattaacatcaaataacgagcctgctaccaatgggcctacaaaattacccatacttgtaaatgtagaattaagtcctccagcaaaactttgtcgattacctgctatatttgaataataattagttagcgctggacgaattaaatcaaatccaataaagacaataaaactaattaacataattgaccagtaactatgagcgattataagactaaatataacaatgacagaatataataatgcccaagtaataaatgtaagttcagtggtatatctcataaatttatcaaaaaagaaaatttggaatactgctcctgcaacaccaccacctacaatagcaattgaaatatcgccaggtgcgtagtttgctttcgctgaagtatatagagaaaataacgtctcaaaagaagacaaaccaaaagcaagtacaaacgttaagataattggagtaataaaaacaccccattggattttagaaagttctttagtttcaaagtgaatatgatgacttttcgctgtattttgcggttggcgaatcaatattacagatataacaaacgcaataatacctaatgcacctgcaaaataaaatggaagacgatgtgatacttctgctaaaaaaccaccaattcctggtcctaaaataaaaccagagttaataattgcagacatataaccaaaatttttcgctttatctttagctatagaaatatctgcaatcattcctgttacaccaggcatgaccatccctgcactaaaaccaccaagtattcttgatactattagaagtataaaagaatgactcatagcaaataagaattcagagattgtaaaaaatactaatcctaaacaaataattaattttttacccaatttatcagctaaacttcctccaaaaggagaaataatcatttgagacaatgagaaaatagctactaaaattcctaaatcgcttccttttaatcctaaatctttcaaatatactggaagaacaggaataacaaggccaattccaacgaatattaaaaatatattaaaatataatgtaaataattgttttttcatgaagatcacctctcttttatctataattaaatactcttaatgaaattcatctaattcatattctgagaaaagttaaaaattctaaatttttcatctttcatttagatactattatatattattttttattttaaaatatactatcttacttaatagtttattcaaagtattttaaatttatgttatatataattaaattatcctaattataaaaatgaagacaataagatgcccaaaaaatggacaacactctcttcttgttttagaacatggagaagatattataaaagaggttactcactttgctcaacattaacatattaaatttgattcagtgagtggtatcggaggttgtgatgagatcgtgttaaactattataatttagaaacaaatgaatatgaaaaaaagaaataaatgaaacattagagtgaacaagtttattagggaatatttctcgtattgataattaaccatttgcacatttacatggtacattggttctcaatattttgagacgttaagtggacatttaacaaaagctgtgatttcaacaacaggtgaaattttcattacgatgattgattgtgatatcaatcgaacgtttgactcgtagactagactcaactgattaaaatcgtaaaatttctctttcaatcaagattagaaacctcaattcaaccgcttcattacaatatgttatcacttttatttaacatcattgagattcttttcttacagattacacatctattttacaattattaatgcttctctaacttttattattctaccttcttttttcttgattacttcgactttaacctttactataataattcaactaaatcgttagaaagtagtgcatattatgacttcacgttatattgcaagaatctattttattattctttttgtaatatcattatttgaaacgcgtgtatttaactttgtaagcttaaatttatttttagcttacattccacttgaattatgtttcttattagatttatttaaacctagaaaaaagtttgaatggcctatatttattatttttgctcttatttttattttattagtacccaatacattttacatggttactgatcttattcatctcaatcagtttacatttgatttttacgtccaacttaatttaatagaatggttatactttactttcttactgctaagtgtattttttgcgatttattgcatggctctcatatttgttcatttatctcatttcacttcaaagctatggttaaatcgatgtttattaatagcacttatgtttttaaatggtttaggaatatttatgggtagatttttgagatttcatactgttcatttaattacccgtccatttactattatcacagaagtcattagtgccttaaatggtagtagtttaatatttatttcattaatgatgctactgcaatttgtcattttattattcattaaagggataagaatggcacattgatatatttctatttaatacagtctattcatgtagaaaaattttataagacgtttagttatgtatttaaaaaagctaggggtgggagcatgaactcaatttgaactctgtttcctttccctagctctttttttatatatttttaaatattgtcatcacatgttcgcgcgcaactttatgatctacaattggttcaggataatctttacctaattgtattcctttttttactaattgcgtttgatgttgaaatggatgatgtaagaattttgcgggcacatgatcgaatataggaatatattttttgatatataaagcgtctttatcaaaacgttcgctttgtctagtaggattaaacatcctaaaatacggcacagcatctgtcccagttgaagctgaccattgccaaccatgtacatttgaagctgcatcataatcgattaattttttcataaaataatcttcgccccaagcccaatcaataaacaaatctttagttaaaaattgagagactaccatccgcatgcgattatgcataaatcctgtctcatttaattcattcatagcagcatcaataataggaaaaccagttttaccttcacaccagcgattaaactcttctttgttataagaccattgtatagtacgatatttttcattaaatgcttcatgtgcaatatgaggatattgagccataagaacataataaaactcacgaaacattacttctctaataaaactttcgtaattattttcattttcctcatatccttctaataaatctgtaataatttgtttaatatctatcagaccatatgctagaacaatactcaattgactagtgagcacttctggaagatactctctatcctttttatagttttgaatactatgattcaaataatccttccaattatttaatgcttgatcttctgattgtccatcatgatgataatcattagttatcgtttgttgtgattggctacatttattagcgatatcacttaaatgatattgatacgaagaatgctgtctaagttttgaacggtgtgctttataaaaacttgtaaatactttatatggttgtccttgctgattcatcgtgttacttggcttaaaataatgattaacgttaatagttattacgggtatatcgtgatttttaaatgcttgttttaagtgtcgaatatcatatctttcttgatgataactcatgatatcgcctgccataactatttctttaatatcatgttcagtacaaaacatacctagttcactataatcgatgacatatggttctatatgatgttctttcaacttatgtaaaaatttttctaaagtgccataataataatttgcctttttatctgtacctttctcttcaaatatttccttaggaattataagatagcatttatcaaatgcatctttttgttgattaatatattcgaataatggattattatttattctaaatactctattgagaatgacgccaatattcatattttcactcctagactgatgtttgttaataatttaactaccctatttatcttaaaattaaaaggagtgactatagaattcaatacaaattctaaagtgactcctttcacttaatttatataatgtgattaatacttttattaaccaaatatttctctattaagtccaaaaacgtatagtaaagtaaagaaagttgctgcacttaaaatagttaaaattagcgttaatatgagtgtacgtttgtacttattaataaatgcgataaacaatattcctaaattataaccaaagaacaatccaaatagtgccattgtgatttttatatttgtaaaaaagatatttaacaatagaataataattgcaaaaattaaatatgggattgtaatccacttaaactcaaagcgaatttgtttagtgcgtttatcttcattatgattcattaatatatcctccttattctattataaatgatatatttttttattctcatgacaagactatgacatatttattagaaatttagaatactcataaccactcccataaaaattaaggagtcattttaagtaaattgaatcatttctaactggtttttcaaacgtgttgtatcaagcatttcaccaataataacaatagttaatggaacttctctatcagttattccataagtaggtaatcccattgaaaattggaattcgtatgttgaatccgactgatctttaaattttacaaatccttttaatctgaatacttcatctggcaaacacattataaattggtaaaataattgtcgatcaataggagaactaaacgtatatttcatagattgtacattatgatggtggacatgaacatgcctattaatatcagcagctttatttttcactactacatcatctaatttactatatgtagtcacgtaaatcattgctttattattaatagaaaccaattgtttttttatattttctaattctacttgggtcactaaatccattttattaagaataattatatcactatatttaatttgctcttccattaactcattcgtctctaccgtatatttcattctattattaaatcttaacgcatcaacaagacctattattttaggaatttccacgtcattaactattgttggatcttgacacgctgcaaaaacttctaaaggatgtgcaattccagtcgattcaataagaatgtgttgactttcaccttctttaataagtgattgtaattgtaatactaaatcattatttaagttacaacatacgcatccattgattaatgattttacagtaatatcttcttcgataagtaaactatcaacgtcaaaagaaccgaattcattcataataatcgttattttctcatctttttttaataattggcgtatataattattcaaaagtgtagttttaccacttcctaaaaagccactaattattgtaatagatattttttgttttttattatttatcattttaaaaactcatttctatataaaatgtatttgaaattaatattataaaaatgtacgttagattacacttgattaaaatagggttttcttctaaaatttaagcatactttaattttagcatggcattgaaatgaagtgtgtgataatttatattttacacaacatagacgaactttaatccgaaataaagagaaacggataaatgtctggaggagaactttaatgtctgaacaacacaatttaaaaaagcaactttgttttagtttgtacaatgcacaaagacaagtaaatcgctactattcaaacaaagtctttaaaaagtacaatcttacttacccacaattcttagttttaaatattttatgggaagaatcccctgtaaatgttaagaaagtagtcactgaattagctttagatacaggtacagtatcacccttactaaaaagaatggagaacgttgatttaattaaacgggaacgttctgaaattgaccaacgtgaagtatttattcatcttactgaaaaaagtgaaaatattaaacccgaattaagtgatgcatctcaaaaagttgccatcgcttcttctttgagtaacgatgaagtccatgaacttaatcgtctattaggtaaaattattactgcttttaccgaaaacaaataatgtgacatgctagtactaaactaattaaagttattcatttcaaaatgtaatttatatatttatcaatagtagaaaacctgagatcattttttaaagctatctcaggttttttattttataatttattaatatgaatcatgcgatttaaataacccttattttgacttaatgatacataatctccgtactcaacaacctcaccttcaaccattacgataatggtatcgaaatatggaagtaagtctaaatcatgtgtagcaacaactaatgtttctgcttgcttgttaatttctttcattacattggtcgtattatcttcatcaagcgctgtagttggctcatctaatagccaaatgttagatgattttaaaaataaacgtgctaaagataaacgttgaatttcaccgccagataaagaagttccatctaaagtcaattgcgttttcaaatttaagtaacttaaattcaacatatttaaaacatcgattaagttttcatctttttgattagataataaattttctctaacagtaccatcaaatatttgttgggattgtaataacgcattgatttcattatatctatcgttttcattaatttgagtaatagattgtccgtataactcaacacgaccttcttctatttcatataatccacatagcagttgcattaacgtacttttccctgaaccagaaggtccaatgatagctactttttcacctttatggatggttaaattaatatcgtttaatactaatgtttcttgattaaaatatttaaagtttagattacaaatactaaatacaggttcttgtttcgtctgtacagttaacttaggtgtagtgatcgaagaatgaaacacctcattaatatctgttaacgcttgatctgtatctgctttataataagcaaaattactcattggaatagcctgttcgaacaaagttaaaatcattaatatcatactcgttacatatataacatctaaatatccatgttcaatttgtaccacggctaaagctaaacttaaaaaaatcgttataatagaaatgagattcaatatataatcataaaatgttaaaaaacgattttctttagcttgtaatctatcatagtattctaatgacttaacgactttctttttatatgcatcttgttgattaaaagtaattaactcttgataacccgctttataatcataaaactcacctaacattttttgttcatgagtagtaatttgttgtttaagtatgcgtacacgcttagcacttagccatggtataatccataaataaaatagcatacttatgacaattaaaatagcatgagcaatactaaaataaattaatgcaacagcagcaattagcgcagttaaacctattacaaaaggaggataatatacacgtaaatatatattttgtagtgcctctactttattgaccattcttgagattaaatcgctcgatctaaatttacgataaatattaggcactcttggaaaaagttgctttacaaactgtactcttatattccttaacattgtaaatgtagttcgatgggataataacctttcaacatatcgcgtcatagcacgtaaaaatccaaataattttacagaaacgacaagtatcatcaatgcgtaaataggcatgcctagtgcactttgagttaccatatatccacttaaaaagaacattgtaagtgctattaggcttccggtaatgcttactaatattgctaaaaataaatctttatctaaatgaaatttaatatgtggtttcatctttatgcaccaccttatttaattgcgtagaaatttgattatcatctttaataagatgaccttcttttacatataaacgtcgggttgcacgacgtatagtcgaattacgatgtgcgattgtaattgtggtagcatgcttaaagttatgctctaatgtttgttgaacaacacgttcagtttcaatatctaaacctgtagtaggctcgtcaaatattagaatacttggacgtagtaatagtactctacaaagttctattcttctcatttgaccaccagataacatttccccaccttcaccaattacagtgtgaattcctttatttaagcttaaaatcttttctttaagtcctactgtttctaaagtttgtaaaattttttcatctgaaacctcattaaacattgtaatattatctttaacagacgctgaaaaaatatatggccgttggtttaacatacctatatctgtaacttcagaattaaatataatgcgaccttttgtaggtgttatcatttgctgaataagattcgctaatgtggattttccagcgccacttggaccaacaattgcaattttttctccttgattgatcgaaaaagttatatcttttaaggcatatagagtcgtattaggatattgataacttactttatcgaaataaatttgattttgctgattctgatttatggtaggcgtgttgatatttgattcttcaacattatttaaaaaatcaaaaataatatcacttgctccttcactttgtttaccagtatggaaggcttgacctaaatctttaattgcattgtaaaattctggcgctaaaataatcgcaattacagcaattttaaagttgatatggtgaaacacgactaaacttaacgtcgcttctagtgcaattaaaccaatacctaacatacttataaactcaagcataaggccagatagaaatgcacttttcaaaattttcatcgttaaatccctaaagcgtgtgctctctttatatatgcgattttccgtttccgttgttcgtctaaatagtcttaaagtaatcaaacctttagctatatttaaaaagcgttggctaaattgatttaaatacgtcatttgttctttagattcgtctcgtgttttcaagccaaaaataatataaaataatggaataaatggtgcagtaaccgccataataatagcagtattaagatgtataaaacacattacaataataatgacgaaaggtatgaacatagatttaaacacttgtggcaagtaattattaaaaaagggtgtaattccatctataacttcagttaaaatgtttgtttgtacgccaattgaagctttagacttacttgttactattttttgacgaaggtcatgtttaactttgtaagctaaaatatcacctaatcgttgattcaacatattaaacgttactctcaaaattaatacgattaaaatagtaaataacaatggataaatagctgaaaccttgtggtacaagacttgattcaaaaactcagcaattccaatattttgaatcactacacatatggctaacaatacactaatcatccccataaaaattggaaataatttatatttaaagactaaactcattaaatttttcaaatttcttcacctaatgctttattatagaagcttgatcacaaataatcatttaattgatttcaaagttaagtgacaatattatgtcatttctttgaattaatcatcttccacacaatacaacaaaatagtttttttatttcaaaacaacatgacattattgtcatatccaccggtaattattagtaaattattatttcaatatgctatgataataaagtgaattttttaaaataaaacatttagcataaatgaaagttcattttttacataaaagaaagaggttacttatgataattattgaatttattaaggcgttaattttaggtattgtagaaggtcttactgaatttgctcctgtttcatctacaggacatatgattcttgtagatgatatgtggttacaatcgtctcaatttttaggttctcattcagcttttacttttaaaattgtcattcaactcggttctgtgtttgctgctgcatgggtgttccgtgaacgttacttcgaaatgttacatatcggaaaatacaaacatgttgctcatagtgagggaatgcgttctaaacctcgccgattgaacttactccatgtattagtaggtatgattccagctggaattttaggtgttctttttgatgactttattgaagcgcatttatttagtgtacccactgtaatgattggtttattcattggtgctatttatatgattattgctgataaatacagtactaaagtaaagcacccgcaaacagtcgatcaaattaattatttccaagcatttgtcattggtatttctcaagcagttgcaatgtggcctggtttcagtagatctggatcaacaatttctactggggtattaatgaaactcaatcataaatctgcttctgatttcacgtttattatggcagtcccaattatgttagctgcaagtgcattatcattacttaaaaattatcaatatattgatcttgcacatgtcccattttatattattggattcttagcagcatttattgtcggtttaattgcaattaaaacgttcttacatttaattaataaagtgaagttagtaccatttgcgatttatcgaatcgtactagttattttcattgctattctttatttcggattcggtattggtaaaggtatttaatgatatcacactaaaattcaaaaagaattttagtgtttttttataaaaattttagataactattttaatctagtgcaatcgtttgaattcctgtatcatagggtaatgaaagagaaagaaaattttatgggggcaacgagtatggacaaaaaacaagttattaaaacagcaattaacgtgttaccgatatttatcgtaccactagttgtagaacgtaaaaaaattaagtctcatccagatgttcaaaaagcttcgcatgcaacttcacatgctacacatacggtagcaaataaggcatctagtgttaaagattactttggtgataaaaaacaagagttcgataataagcgtgaactcaaaaaaattgctaaagaaaatgatcctaaatatattaagaaaaaaggatcaaaattagctaaaaagaaccataaacaatcttctaaattagagaaaaaacttcaaaaaaatattgataaacgtcataaagaagaagaaaaaattcaaaaacataatgaaaaacagcgaattaaagaaatgaagaaatatgataactataatgctgacagtattattactcaagataaagcgttacattcagaaaaggttacaaataaataatgacaaccatatttgttgatggtgatgcttgtccagtcgttaatgaaattattgatttaacagctgagacaggcttttttgttacgattttacggagctttagtcatttttctcattctcattatccaagtcatgtaaatatactatacgttgacgatggaccagatgcagttgattacaaaattatacaacttgtaacaacgagtgatattgtgattactcaagactatggattagctagtttattactaaagaaagctagaattataatgcatcataaaggatttatctataacgaaaataatatagatatattacttcaacagcgttataataatgcacaaattagaaaacaaggtggacgtcataaaggaccctcccctttttcaaaagcagatcgacagcatttttgtaatgtttttcaaaccttacttaatcaattaatggaggatacaaaatgaaacgtatagcagtatattgtggagcaagtaaagggaataatcccatttatattaaagaagcgtatcaattaggaaaatatatggctgaacaaggttatgaactcatttttggagctggttcagtaggtatcatgggcgctattcaagacggcgtactagattacggaggccatgcaattggagtcatgcctaaaatgttagatgaacgtgaaattactagtcaaaaagtaagtgagctcattcttgtagactcaatgcacgaacgcaaagaaaaaatgactgaattagcagatgcttttgttatggcaccaggaggagctggttctcttgaagaatttttcgaaatgtatagctgggcacaaattggtatacatcaaaaaccaatcggcatctttaatttaaatggattctttaatccgcttcaaactttgattgatcatatgattgaagaaggttttatcgataaaaaatataaagcgttagcacctttatatgacactaaagaggctctaattgatggattacttaattataaatctcttggtgttagaacctatgattgattaatactataaaaaagatgggccaacgaattctttttgaattcgttggctcatcctggtttcggcacccaaatgtagagactttcgtgttgagtgtttctatatttaggtttaggactagcaataaatttgttttttatcgtcacattttttatgtagcccatgacttttaatatgctaaaaaacctctgggttttctatctattttctagtctttattaatatttatatgtttaactttttttgatatcttacatgtcttttaagtggatgatgtttacttagttcagatagttcaaaataatcaaataatgacattccaattttttccattacttttcgagaggccaaattcccctcagcagtgagactaaatacttcttctatgcctttttcttttgcatactctaaaacagccatagcaccttcagtagcaataccattcccccatacttcagggataagtcgccatccaatttcatatataggtaaattttcaaaaggatatttactatcttttggtaagtagtttaaccctatatatcctaaccatgctcctgtctctttaagctcaacagcaaacagcccaattcctttttcctttaaaatgtcatccatttgttgcatatctaattctgaacgtctataacttaatagacttggaaaatagcgtcttacctgaggatttgcattcattttttgaaaagataataaatctttttcttcccaatcacgcaatctcaatctttctgtttctatataaacaaccatttatccacactccattacccaaatacaattatgaaaaaagtgtgacatggagtatataaccataacacacttcgtttcgttcattttgattaaaagattattaattttttgaaatataacttattaattcgatatgtactggaatctcttttaacttattacgttgatttttaggtgctacaaatgttgcatcgatataatcattacgatgattaagtttgaaagtagctacaaatgtatcactttctgattcaaaatttggcaagtgtgccacaacacgtttaatgtctccagttgaatgagttactgtacgtccagtaatattttcaatctctttacctaattctggaagtgtaatgtcacgtccctctaagatttgaaaatcatgttcatgcatagttatctctcccatactataaattatgtgctaaattttattattatatttttaaactttattttcaaatatatgaatattatattcaaaatgtatttaaatactattacccttcttattctatcaccaaacctgcagccttttaaaacctatattagttactctttgtagacgaactagaacttgtattattatttgattgttcactatttgagtcactactttgttcttcagtactactagaactttcatttgataaattcgtttgatttgagttatcctttttggatttttcagtttcttgtttaactgattctttggcaacagaactatctacttctttttgtaacttttctcgttgcgcattgagcttttctttttgtttctctagattatttttttcattttttaaatctttattttctttttctagctgtttaatatcattttctaaagatactttttcttcacttttaccacatgctgacaatattaaagtcgcaaatagtaaaagtacaatccacttcttcatatatttctcctttaaatatgtatcaataacacttattttaacatgaaatgtggcttgattcattttattattttaagtcttttcgcatttgtttattattggcctccactgtactttcgatagaatgagcatctttttctatcgctcattgttctaatgccaattttaaattagtagctatcctactgtttcgaaaatgagggtgtgtatataacatttcaatcgttaccactttcgtaatcgtttcaaattgatctcaagtgaaagcaaaaggttctctaaaatcatggtttaactcaataacataaataatatcttggttcatttttaatcttctctcaaacatttcttgtcttaatgctatagaaagtgttgtagcatgataatttaatgcactttttctaagtaatattcatgaatacgtgcaatattctcaattaattgataattagtcattgaaagaactctctttttatattctccctatttatacattatattctttacataactatgatatgattattcatatttaatatgtaataatcaacttttaaaatttttaaacatttttatttttaaggggataataaatgaaatcgactgcaacattagcccgtgaaaacaacgtaaaatcaatgcgtttaaataatacggatcgagaaatttttgaaaactatatgacttatattagagcagatttacgtgtaaatccacatgatagtgaactcatgctcaatcgtattttgaaggagttacttgccgcagagaaggatggaactttagctcttgaatttttcgatcatgatccaaaagcacatgctaaaaaacaacttaaatccctaccaaatgaaacaattaaaaatattgttaaatctatttttagaaattttatctttttagtgggtatattctttttctttaaagggtttatcggtttttttattcctgataatcataatgaagtatatttatatacctttcccattacgctcttcattggtttagctattatatttctctttattttagtcgtttttaaaactgttcaattacagtgttttaataattcgcattggatttggtggtttaattactgtattatcgcattactagtagtagcactgttttatgtgttttttattccacagtcatttttggcatatggacctagtattcgaattaataattgggcatttattatcatctctctaattattacacctattgctttctatatagaacatcattttgttgatgaagattcaaatactgtgttataaaaatattaaataagagcctagaacattattctcagaaaaataacaactcattgagctatatataaacaaaataattataaaaaagacccttttcctattatttcaatagaagaagtggtctctttcatttgtcgaagtatttaatgtcctagacttttattttcatacatcatcatttctattaattattgtatattcatacttgaagatgtaaacgtttgatctttagtgaacaatattaaaatcatcccaataaaaatagataaggcagaaacataaaaaacgttttctaatccgacccaatgactcattacgccccctaataagtttccacataattgtcctattaccattgcattagcaaataaagtcgaagcataaccaggaaagtcaggtaatatatcttggaaataactaatacccagtcctaataaaatcgctaaataaaatgctaaaaatacttgtcctatcatcatcatatatatattttcaaatataccaatactaaaatagaatagaccaccacttatggctcctagtataagcaaagtgcgtgtagataatttggatgctaaaatccccaatataaccataaaaggaacctctaagccggcacataaacttgctaaagtacctacataaccttctcgttctttcaaatattctgtaacgaataatggcatattcattgtatacatccactgaccaatatgtagaagtataaaagcaataaatggaataaataacgttttatcttttaacatattaggtgcagttatttcaatactagcagtatctttaacttggtcgtttatactcacatttaaatccttataaaagaatatttgtaacaatagtgtaaataataaaatgataaccgtgccgccaaatagccctgcataacccataaattgaatgaggtatgcaccaatgagtggaccaaataaaaagccaaaagagaacattgatcttaatacagtattagcaaatttcgcattatttcttgatgaagacgcattaatagattctctagcggatgcatataattggggcattgcaggtgcgaataatccttgaaatatcgcatatactataataaatagccatatatgatgtatgtaaaaatatatagaaaaactaagtgcccccataaatagtgcgcaaataataagtattttccgattaagatgatgcgtatctgaaaatctagcaacaatcgcatttacagtaaattgacttactgcagccaaagccaaaagcacaccaaactgatttgtcgacattcctagttcttttgttgcgaataaaacaaagtatggcactgtaatggcaatacccattcctaagagcatcatattaataagaaataatttatagtttttaatatgcaatagtgctgaaaacatatactatacctctattcttcttttaaattgcaatattgattaactattatttagtaaaattaagcattaaagatacaaaagcatcaacttgtggtagttgcaatatactactatcataactcatatatgttgagcggattaacggaagactatcaatattgactttttcaaattcaaatacgtgatgatcaatattcttcatcattatttctggaagaatggttacgcctacaccacttattagcatttctttacatgttgccacttgatctactgtaatagtagcatgataatcttgtccaaatttttcactataccaatgattaatttgatttatatatattggatctgcttgaaattcaataaatggtaattttgaagcatcttcatgacgttcttttggataaataaaataatgttcatcatcaaataaatggatattttttaaattcattactttattccctctagtaattaaaaggtgataatctctatgattagacctaatttgttctgttgaacccacttgaacctgtatttctacattaggaaattgtgtattatacaaactcaatacacggggcaatattgtttgtccaattaaagatgaacatcctatagatatggttccattgacttcccctatatgtgcttgtattttgtcgaaaaacattttttctcgattcaacatatcacgtgcatgttcgatgatcattgcaccttctgtagtagtaatcaattgttttttagtacgaataaatatttctactccaaacgcatgttcaattgtttttaagcgttgtgtgactgctggttgtgatatatataaaatttcagcagcttttcttaacgttttcgtttcatctaatgtaattaataattgataatcttcaattttcatagcttcccccttatgtttatccacgaatacggctatgatggtaaataaaattgatactatttcattattgttttagtactaaagaaatataattacgctttcttatgcttatttaatttacctatcatctttttataacaatgcataattcgatgatgtatctctgcaaaattgtcatcaatctcaatcatcaattgatgagcgataatataggcttcatggaattgtttcttcgtaatttgtccatttttcaaagctagttctaaatcatgttcatctactaactcatattcgccagtggatggtaaaactagcacatctaaaaataaatctaatgttctcgcgttccctttttgagtaatatttttaatgttaatatcaaaatagtactctaatggattccccttatcatcaaacattgcagtaatactatagcgttttttttccggcaaaatttgtaaccatttatagttattatctactacaactacattttgatcgaccaccgtcacctctaaaggctcacgcacctttttcatcgtgaccaagccaataatacctttaaacctattattatttaccttaacttctatgtaatcacgttcaattaggcgacgccagtgacgtttatctatgtatttaattttcacaaagccaccaactccttgtcattattatattaaactaagtaaaccatgtcatcttatggcatgttttattacttttaacatataaatttattaaattttcaatttcattttactataactattaaatttttaggtaaaattgacaaaaacactaagttttgataattttattctatattatctgaaaattctaaataaaaggagcgtttttaattatgacagttagaccttttcgagcagatcacgtgggaagtttattacgtcctaagcgtctaaaagaagcgcgatttaaatttaataataacgaattatctttagatgaattaacacgtattgaagatgaagaaatcgaacgtattattgaaaaacaaattgaaattggtttacatagcattgcagatggagaatttcgtagaagttggtggcattttgattttctagagaatattaatggcgttgaaggatatactcctgatcatggattagaattcgaaggtgtagaaacacgtgcacataatgtgagaattgtggacaaagtatcatttaatccaaatcacccacactttgaacactttaagtttttatataaaaaagtggctggtcgcgcaactgctaaagtatcaatacctagtccaaatcaattgttccatcctaatattttaaacgaaacgatttatcctaatatagaagattttgcaaatgatattgcaaaagtttatcatgagacgttacaagcattttatgacttaggagcacgctatattcaattagatgacgtatactgggctggtttaactgacggtactcaaaaagtgagaggtcgtcaacgctctgaagatgaaaaactaaaagcacgtgatttagcctataaagtgattaataaagctatcgaaggactaccaaatgatttaattctgactactcatatttgtcgtggtaactataaatcaacttgggcaatttctggaggatatgaagccatcgccccttacctatttaaagaaaatttaaatggtttctttttagagtatgatgatgaacgttcaggtgatttcgaaccgcttcgtttctttaatgacaatgcttatgcagttctaggacttatcacctctaaaacaggtgaattggaaaataaagaaacaattaaaaaaagaattaaagaagcagaacaatatgtaaatattgaccatatctgtattagtccacaatgtggttttgcttctacagaagaaggcaacgctctaactgaacaagaacaatggaacaaattagcctatgttgtagaattagctaatgaactttttggcacggctgaatagaaaatggtcagaaatgttgtcctctatctctttttaaaataaatctttttaaaaaagacacttcattaatgtagttatacttaactcgattaatgaagtgtctaattattaatactcaatgtttttcaatgcatatttttgaatcattcggcgatattgtggatatgcttctgtcaactcatcttgtgtgaataattcaaaatacttaaattcaaatgcaggttgacacatacagcctactaaactataaccttccgaatgaggtacactcgaagcaaaaatggttcctttgggaacaacatattgtagtacttctccatggtctacatttggacctaacaagacactacgatattggccatcttcagttaacatatgtatctctagtgatacaccagcatgataataccatacttcatcagcatctatacgatgaaaatgcgaaatatcatctgcttttaataagaaaagtatactactaaaagatgccctttcatctttctttacaccctccggtcgaatagtttctttataatatccaccttctggatgagattccaagtctaacgattgtatccaaaacgaagccgtgtgtttcactattttaagtccacattatggaaaacattttgaacatcttctaaatcttcaagtgcatcaataagtttttcaagtgttgcttgatcatctgctgaaagttcaatatcagtctgaggtaacatttcaaactctgcaattttaaagtcttctacacctgattgacgtagtgcctcttgtacttgtgcaaattgatcaggttctgcatacacaatcgtcaagccatcttcttcaataacgtctcttacatctacatcttgttccatcaatgtttctaggacatcatcggcagattttccttcgacaccaaacgttgcagtatggtcaaacatataagccactgaaccagatacacccatattaccaccattttttccaaatgctgctctaacatctgatgctgtacgattcacattattagttaaggcatctacaataagcatggaaccacttggaccaaatccttcataccgtagatggtcataattttcatctccaccgcctttagccttatcgatggctctatctataatatgatttggaacagaatatgtttttgctctttctagcacaagtcttaatgcttgatttgattcaggatctggctctcctgatttagctgctacataaatttctttaccaaattttgcatatattctactagtatttttatctttttgggcttttttttctttaatattattccatttacgtcccatattgtcatctcgctttcttactcaataatacttattatatagtattaataatttattgtctaaattgaaaaaaacgttacttccttataaaaaataaaatactgacaaagcatccccttgtcagtactctcccaattcatttagttaattatctaaaaatctttctacatcattaaataaagcattaaattgatcaatattagatttgttcatatagataaaaattttacgttcatcttctgttgatcgaactttacttaatttctctttttctattaatctgcgtatagaaacaagtaattttgttctacttaattctagttcttcaattgcaacttttaagaatgtttgcattaaaatttgatcgtctgctgtgtattcataagctaattttaataaagctaaatcatttaaggttagtttgtattctttctctatatattcagacaacgctttatattgtttatagattttcagcaagcgatttaattcatcgttactcaagcatttgcacctccaataaaagcgaacaattcaacatatattatcctttaattttggagttctgtcttttgcatttgttttgaattttttgttaaatttaccaacaaactcaaatattgttgtgcaaaacttttttgagatgaaatttattatttatatatctcaattatataaagcccgttataatcaagtttaatttgtaatgcctctttattaaagttgtgttctctaattttaaaagaaggatgtaataaacgatttactttcttcaagaatgttttagaccattgataacgattacgtatgtcttcagtaataatatgattaatattgccgttataatcatcaatctgttgaatttttataagatgatttttatttgtcttatgtttaaaatctacatatatatcagttttttcataattagcatttcgtgattcactttctagaacacgccaatcatatataaatagtatgaatttattttctttttcaatcactatataatgatctttaatgtattttggttcctgactaagcgtcatgatatgggccatcattgttcctaatattgttttaaaacctttttcatcaaaaagatgtaaagcattaaattgatgactatcctgtctaaaattgaaaccaataccgtcaaagtgttgagctgatttaatatttgtttctacaattaacggggcactactatttaagtcattatattcactatttaaaaacacatgattttcaacgtttaaaaatatgattctttgattttctaaatcaatgtgatttaaaatttcacgtatattttgataatgtaatatattctttactaataaacgattattaccttctattaaatagggttgatttagttttgaattatcaataaacagaaattggaaattcactcttttaatttgcgattctaaagttttaaataaaactggattatttagcaatttgctaatttctaatccaaaagaaaaccgatttgttttatgttgtatttttaatatcatacgataaatggcttttagatcaatcttttctaaatcaaaaacaatacctaattcatgatttacatttacttcaacttggtgtatttcaagataatctaatacattttcatatgtcatttcaagaaagttaattaggtttaaatcctcaagtttaaaacttatatttagattttttctaataatatattcaaatattcgctgaagttctttaacagtgaagtgttcttttatttccttcatatccactcttacataaatcattaatgatggactctcgtcaagataatcgatatatttttctaaaaataacagttttatttcttcaatcgtattgatttgtactacacattgataaggtttgataaacatatctaattttgcatcgagatatattttatgttctgttttcttctgataataatattgttgtgacagaatcatatctcttatattttgtagactatcatcaatatgagtttcataatccataaaaatcattttttcatatttattacatgatctatactcatttggtgtcattcccatataacttttgaacgttttagaataacttgaagcattactaaaccctactttttcactaattaaactaatcgtatcgtctgttttcaataataattcaaatgaatttgcaatcttcaaagtgtctacataagttttaaaactaatatttaacaactgtgtaaattgtgatgataaattagatttagatgtaaatagattagatgaaacatcttttaatgttaatttcttttcaatattttcgttaatatagtctaatacttcacttaactccccataataagcataattatattgatcattagcaatatctatttcaacactaccttgtcttccaataatttgaacaatgtcaactatgtatttgttatcttctgaaacagatttatgattaatatgattcattgttatctgtaataatgctttttttattgcattaatagatttaactaaattaattgaatatttataatcaaagaaattaaatccttcttctttaaaccaatcacttgcaatataaatcattaatgttttctcattcttattaattgaaaaaatatctttattgtttataacgtagagatcattattaatcgtcacttttttggcaaaatgttgaatttctaatgaaccttctattgggaacagcaatatgataccatcttgacaacgtgtcatttgatattcatgcttagtaagtacctgaaaatacccattagacatatactaacctctttctaatcttggtagtccttcttttaatgtgtttatataaaaatgctaatttataagtgtttaaatgtaaatctatcacaacattaatactaaatcaaaaatacgtataaaattaaattaagttttattttatattaaatatatttcataattatttaaaaaagatgctctataattgccttcttactttaataaaataaacagcttaaactactctttatttaaaatgttttgaaaacaatgtgagaacatcttttctaaatattcaacttattataaatatgaatgactagtttttaaagcggtttgctaaattcaatatatctttaatgatgtttaataaattaagaaataaattaaaccccatttctcttggcgtaaatctaccatgtttcatgcgattaaaatcaaataatgtatatagtaaaaacaagactaaactaaccattgtaataacgatatggaatattgaattatgaataaataagccaactagactagcaataataagggcaattaacgttacaaataaatatttacctaagctagaagcatcatgaataacaaaataccccaatattccaaatacaatgaatgctataatggctaacaatatatttttataaaaaacctctgctcctaaattttgcatatacattgaaaatgttgcatacgataataaaccaataataatagcatagatatgcgaaataataagaccatatttacgtgctcttttaataaataacgtcactaatacaatgacaaataatgtaattgataaaggacgtcgccattctactggcaaatattgacctaaataacagccaattccaaaaataagccaataatatgtaaaaaatagccaaactttacgatatgcatgattttgttgagtattatcttttgaacgtacattctgatgttgatgatttactaaatttgaagaacttgacatcttatactcctcttttaaatagtgtcttacaaatattgtacaatatttgttgggaatacaaaaatagtataatttatttacttttaagtaagcatcctatcaagaaaatataaaaattattacaagtctaaatcattaaaaacaattcaacctacttgttacatgatacgtacttgcttcaattttactataagaaatattacaaatttctttttaaaaaaatttaattttatctaaatacaactgttaaagactactgtatcaaggtttttatctatttacaaaaaatagtattacttttaataatattacaagataataacaacccacatattcttatatttttttgatagtatatgcatgtgatataaaaagatgaattatacaaatttaacaatattaaattctaaaaataaattttaaaattcaaggaggatacgtagtttgaaaaagttagcttttacgttgtctattgcgtcaggcgctgtagcatttttctctcatcatgctgaagcatcaacacaatatactgttcaacctggagattccttatggagtattgcaaacaaatacaatacgcctgttgatgagcttaaacgaaataatcacttaaatggtaatttaatttttccaggacaagtactaactattaatggatcatctactactacatcaagtagtttatcaagtaaggcttctactacttatactgttcaatctggtgattcactttctcgtatcgctaataaatatggaacttcagttactgacttaatgaatgcaaataatttttcaaattatttaatttaccctggtcaagtattaaaaattccaagtagttcgagtactacaaactcatcgtctactactgcttctcaaagcactggttattcttcaccaacttttaaccatcaaaatttatacactgctggtcaatgtacgtggtatgtatttaatcgtcgcgctcaagctggatcacccattagtacatattggtctgatgctaagtattggacttataatgctgcttcagatggttatattgttaatcatacccctactgttggatcaattatgcaatcgactgctgggtattatggccatgtagcatatgtggagcgtgtgaatccagatggtagtattctaatttcagaaatgaattatacatatgggccttataatacaaatactcgtgtgattcctgcttcattagtttctagctataactatattcattaatatgattcaaaccacaaaataagcttgagacatgtttatgtctcaagcttattttgtggttaatttaccttaaagaaaaatatttaaaatccaaaatataattgctgctaaaatagcagaaattggcaacgtaataatccatgtaataatcatacgttgagctgtattccactttacaccttttgcacgatttgatgcacctacacctaaaattgatgacgatacaacgtgtgttgtagataatgggaagtgtaatgatgaagcaacgaaaatcgttaatgctgaagataaatcagtagctgctccattagcaggtcgtattttcattatatttccgcctactgttttaataattttccaaccaccaattgcagttcctagacccattgctgtggcacaagcaattttaacccataatgccggttccacattcgttggatcttgtaaattcgctacaatcaaggcaagagtaataatacccattgatttttgagcatcatttgtaccatgtgaaaacgattgaagcgctgcagtaaacatttggaaaaagcggaaattacgatttgctctcgtaagattcgcatttttaaaaacaattttaacaattgtatacatgataaaaccaacacaaaatgcgataattggtgaaataattaatacaatgataatcttagtaaaaccttgataatgtaatactgtaaatccctgtgcagctattgcagctccagcaatagcaccgattaaggcatgcgatgaagaacttggtataccatataaccaagtaaccaaattccaaacaatagcagcgataatagccgctaatactactactagaccattttgtaatttaaatggatctacgatatctttagtaattgttccagctacccctgtaaaagtaagtgcacctataaagttcataactgcagctagaaaaatagctgttcttggtgtcaatgcacgcgtagaaaccgcagtagcaattgcatttgctgtatcatgaaagccattgataaagtcaaagattagagaaaatacaacgatagctatagtgatgactaatacatattccataatttaaaactcccttagctatttttcatgataattgtttcaaagttgttagcaacagcttgacatttatcagcgatattttctaagctttcgtaaatatctttaattttaattaaagtgattggatctgtttcactattaaagatatgtttaattgattgtcttaatataccatcacaatttgtttcaaactctttaatattaattgaatgaattctcatgtgagataattttttatcaacaagtaaaccaactgctaatttcatttcagcgacagctttttgaatattgtcaacaaattcagccatatattcatcagtatattcaattgaatacatttcaaacattccagatgtttcttccattgcatcaagtacatcatcgattgcattacacaatgatagaatgtcttctcgttcaataggagtgataaatgtttgatttaagtcgctaatgaccttgtgcataagttcgtcaccatgtgactcgtacgttttaatgttatcagaataagcttttaaatctaaatgggtattaaaatccattttcccgaattctacagctgcacggtccagattaaataccatttcttctaattgaaccataaacttatcctttttcttagtgaacattataatgcctccattttagcgattgctatcaatcacacgtttattatttaatttaagacaatttaaaaatgagctacatttacaatagcttattttaaaacattatttagaaagcttttgtaaagtttatgtaaatataatgttataccaattacgatacacttctacttaacacctaatttgtctctaattgaaaatatcataattttttcatctctacaataaatttacaaattctttacaaactcgaaatattctctcttaaattgagtgattgatcgttcgcttagaatgattataagcaataaatgcaaacatactatatactattgtataaataatcataactataaaaatggacatttgatttgtaaatcctataaatttcataaatacaagtgctgcaaaatatgcatgaagtaaagcaatagccaaaggtagtccaaagttaaacgccactttcaattttagacctctagccatgtctttttgagtaaaacctaatttacgtaatattgaataattttctaattcatcttcagtttcatcaatttgtttaatatagataatacatccagttgctataagaaatgcaatacctaaaaaagaacttacaaataataaaattcctgttaaacttgaaatttcgcttgctatctgacttctagtttttaaattctgattcatgtgattgatagtcttttctaatttaggtatatcttttgtatgttttaaatcaaaaccatgttgagaaatgatgtccttatttttaacatgttgttttataaattgataatccccgttattaagcacgagtgtcggtccacctaaatctatactctctttaaaataaactttatgaatcactttttgaagttgaactttagtatgatgtcgcttcgtaccaatcattgctgttccgtgtggccgatgtttagttaattcaggaataacatcttttgggataattaaatctgtttgtccttttttcaaagaaatatttgaaaagtaatcttcacttgttatagtcaccgaataaggtctagctgcatttacatcaaatagatgatctttatataaatgcgtgtacactacttgcttataattatagttatatgcaatatgctgttgctctaattgatattttaacttttcggacaaggtgtcgttgttcgttgttacttcatacggtgattctaataaaatttctttacttaaagatcctcgactaattgctgcaaaacataggacagatacagtaatagcagaaataatagaaatgattgttaaagagaaagcattctttctaatcctaaacattaatgaagaagtgaaaataacatcatttacagttacatttccacttttaaatgatttaattatttttaatattagagacactgaacttctgaaaaagaaataggctccgatcacagttaaaaataaaataataaaaggtaatacgatatcatctaataattcaacaaatcgtgtggataaataatatcctgccaaaatgaaaacaatacctaaaattcctagaataatttctccaaatgtaatatgtttacctgtttcatctatatattcttcagactccattaattgtgtaacagaatatttatttaagaaaatgatagcttgaagaataattaaaatatatgcaatgattaaaataaataaggtttgaattatagcgtctacactaaaaataagcgataccgaagtatgtatacctaataatttcaatataatcataagtaaaattttagacccaacaatccctataatcatacctaaaactgcagtgatcaagaaaataaacaattgttctaacataaacatataaataatacttactttatttaaccccataatctgtaatagtcccaattcgtaacttcgtcttttaataaaaagaatattggtatacataataaagacaacgatgattataaatagaaaataacttcctattttagaaccctctctaataatagataaagactcatgtatatggagatgatgaacatatttaatcgtaataaaactaaaatataaaacagtactaatgactaatgaaaacatataaatagcatagtgcttaatatttcttaggaaatttctccaaataatatagctaaaactcataaaccttgccacctaatatactttgggctcttaatatttcttcataaaataattgtttattatcttgtccttgataaatttcagtaaatattaagccatctttcaacattacaacacgattagaaaaacttgctgcaagtggatcgtgtgtaaccatgataatagttacatcatagattttatttattttttcaaaacgtatgagtaaatctctagtgttcttagagtctaaagcccctgttggttcatccgcaaaaataattttaggatatgtaataaatgcacgcgctgcagatgttcgttgacgttgtccccctgagatttcagacggatatttatcactaatatcatatatattaagcgcttcagtaatttgtctataacgtttattcatttcttccttatttaatttaagtactgataaaggcaacataatattttcttttacagtaagtgtgtgtaataaattatattcttgaaaaataaatccaatatctttttttctaatttctgataattccctatttgataacttttccaattgttttccatttagtatgacagatccttgtgataaataatctattgaacttaaaacattaagtaatgttgttttaccagagccagaaggtcccataattgaaacaaactctcctgtttcaatgtttaaatcaatacctcttaacacttcttgtatcgtttgttttgtcccatatgttttaacaatttgctttgcttgtaatattgtcaatttagaatgtccctcactatcatatattttaactattgaatgatatagatgaacctgagacgtcattataaagtctcaggcttcacccaatgttctactcacttatgacactaaaatgatatttccatacgcttaatttatgtatttactttaaatattatataagttttagttcaaactttttatagtaaagtccaatatcttatttctataaagcgaacaattatacttatactctattttaacaacactattatgatagacttaatttctcttgtgacattctttctatgacttcgttttgaatagggaacgttaaaataaatgttgttccttctcccaccgtcgactcgacctctacttcaatacctaatggatgtcttacactttctactaagtataaaccaattccagaagaagttgtttcattacgatttgcggtagaagtatagcctctttcaaagatacgtggtaaatctttagcgctaatcccacgtccataatcagtaatttctaaagcgatatggtcttttttagctaacgatcgaataacaatatcttttccttgagaatatttcaaagaattagataaaatctgtctaatcatcatgcgacaccattttacatctgtaaatacttctggattcgtatcaaattctaattcatagccaatacctttaacttgactgatatgacgagtaagttgaatttcttctatcactaaacgttttaatggtactttttcgaaatacatatctctatttttagattcaagacgtgttaaataaagttgcttatctaataattcattcactcttgaccattcataaagtaaggctttcttacgttccatatcttcagcttgatcaattaataatttcattgctgtaacaggtgttttaatatcgtgaacaaattcagttaacgattgttccgacgcttgtatatgaatttgttgttcagtagctctttctttgtgaaacaataatttacgatataaatagtccaccatttcttgttgaaatggattctcagctaattctttgtgtttaatttcttcgatttccttattattataaaaatgttgatataattttacttctcttaaaaaagtaaaaacaagaaatatacaagttaaacctatatttaataggacaatgtatgatacactttcaattgccatatcatagtctatatatgccatccctaaaaatacaaactgtaaaaatataatccaaaatatccaattacttcgtgttttaagaaatagccaaaaccatttcacattactcatgtgccatatatcctttacctacttttgtttcaatttctgtttccataccgatctcagataatttttttcgtaatcgatttacattgactgttaatgtgttatcactaacaaacgcttcgtcatcccataacgctgtaattaatgtatctctagtcacaatttgattttgtttttgaattaacatttctaaaataatcatttcagttttagataaataaatgattttatcgcctttttgaatactatcttttgaaagatcgactagcgcatcttgccaatttaatgtacgtctttcttctacgccaaattgatatacgcgtcgataaattgcttgtaacttcgcaattagtacgttggtatgaaaaggcttttgcatataatcatctgcacctaattccatactcatcacttgatccataggattatcacgtgacgataaaaataaaataggcacattagacacttgtctaatttgacgacaccaatagaatccgtcatatttaggtaattgcacatccattataacgatttctggctgaacattatgatatgtttccattacgttactaaaatcattgacaccataaacaaaaaaatcccaattttctaattctttctttagttgttgaaaaagcgtctgatcatcttctactaataatatttgcatatgttttcatcctatcactttgtatatttcattttttctcctgattgcacacgtccattgaaatgcctaatacgacaatcaatttcaaaccctctcataattaaactttgtacgggagcttgaaaaaaataatagagtggccataacaatttaggaatataatcatatagttgaacaattactaaacgcgttcctttaatttgacgaaattccaattttccttgttttttagaacgtttttttataattgaaccgcctactaaattaaatgtaattaaacgattatcatttacttcttttttcattactaatagaggcttacattcgttacgagcatatattatatatcgattttctatatatttcgtgtgtaaaaatgtaccacgtgtatcattcagccatttaaaaaaataagcgactaattgttctaaagaccatttcctaggtaatatcattcttaatgctgaccgtatatcattatacttagacgcttgtaactcaacattaatatgagagcgcttgatataggtctcagtcgtttcaacaggaacaccatagttttttaaacactgtattgtctcactatcaaagcgattacctcttacgtacaaaattttatttattccttgttgtgctgctgcccttgcaaaattatcggctgcaatgagatttaaatcacgtgcagttgcttgagtaagcttggcagaatttttattaggatctaaataaaatactgcaatattcatacctgacattgctgatttaacatcttcataattataaatatctttttttagccatgttatattacgattaacctctttttttgtatttggatatttagataaagcaaacaaatttgcatcattttctatcgcactgctaatattcttacctatataaccactaccacccgctaacaatacattaggtttcattattctgttactcctttttaaaattctaaatatgtatattttttaaataattggtataatatatgttatattactatctcaggaggaagccgaatggctcatattattcgtgaaattagtataaaagatactgaagctttgacaacattattagctaaaatatatgatgaatctgactatacactttataatcctggagaatttaaccctagtgtgtcttctattagtaaccttctagagcgtatcatcacttctccgagaaataccatctatgtagctgaagaagatgatcaactcgttggatatatattcgtcactactgaaaaatacgaacgtacacaacatgaagcagttattacacttggcgttactaaattgtatcaaaaaaaaggtattggacttgctttaattaatgctgttgaagcttgggctcttaaccataatattaaacgtcttcaagcttcagttgttcctgaaaatacacacgcaatcatgctacttaaaggcgctggatttaatattgaaggcgaacttaaaaataagttactgatcaacaatcaatattttaataaatatattatggctaaattactactttaattacaatatgtattatacgctacgttcaaaatgcaaaaaagcaattcgtgttaattacacgaattgctttagactgtctatgagttatttaactttgtagacagttttttttatggattatttattttatcaattttaagcaatgtggtctttattatcacttttacgtaaatagtatttaataagcactgctaccacaataaataatccaactacgcccataatgttatataagaagttgattaagtctgcaaaaccaacgaaacttaaaataaaggctgcaatcatcataatgataataaatatatgatattttttactgtatggctcagtgaaacgtgcagcaaacgaataagtcaatcctaaaatagtattatacattactgctagcataatcactgttaaaactaatccaagccatggatgaatttcattcgccaattttaaagttggaatttgttcatttttaatttgtggatattctgattgtagtgcaaagttaatcagtgcaagtaaaacagtatacactacaccgccaaataaagcaccggcaccagatacttgacgtttagatgcatctccaccaatcgccacaaccgtactaaatcctacagcaaaagctaatccaccgtacattaaccctctaataatacctaagaataaacttggatgatctactgtactattaactttactgatagagatacttccagcaaatagataatatatagcaataagaactaccatgacaatcaagaatggtgtaacaacacctaacgctcttacaatcttattaaagtctaatagtagtgttaaataaataacgactgtcataattaacgcgccaagccatgtaggtataccaaagctttcttcgaacgttgcgcctgaacctgcaatcattgttacagcaattccaaataagaaaaagactagaatataatcaaagattttactaaatttttcaccaaataaatattgtaatgttgattcatgatttgttgcttcaaaagccgttccaattttagcgacttgtcgccctataaatcctaaaattaatcctgatattaacacgccaatatatgaccatagaccataaggcgtgaagaattgcattacttcttgccctgtagagaatcctgcgcctactacaatccccacataagcaaaacctatttttatagattctttattcaatcccatgtattgattaacctccttatttttgacacattcaaaattataacgtactaataataatatgcaacagtgcataaacgttgcgagacaacgcttatcgcttctaagtactagcattaatactcttacaaacaatttaaaaattttaatatttataataatttgtcacaaaaattatatttgagttactaagtaaaacattattaaaaaaagttagataaactgaataaccatggctattcattatctaactctcttatttcactatattattttattttgaacttccaaatttctttaattcatcaaaattgactataacattatccatgtgtttagctgaatcttttaacacatttcttgctacatgattattaggatctaattttaaaatttgtttagctactttaaacgcttcagaatctgaaataattgggtcgggtatagcatataataatagcatttgaagcaaactttttatttccttaccatttgttaactgaatagaagcatctgcatgataatatgccgcttctaaagcgccttctacttcactcaaaggatagactaataataaaaatgctaaatcatgtaattctgctgtttcattatccttcatcatatctaatatacaagtataaaacataatgttttcttgttcatgagcacatgatatatatacttcttcgaattccataaaatcaatattggacattatatttttaatttcttcaaatttgccgttcagaacgtaaaatttaatatcttcttgtagcgtaatgtccacctactttcatcatcaatatcatgctatttattttatcatattcattttggataatcattttataaccttttttttatataaaaaaacatcaaaattcatcattacttatttaaacgctgtagacttaaatgacgatcgattcacttcttgaatcgcttcattagcagttttaccaacacttaaagacattgctgctgtaaagcttccttctacaatgggtgcatttactttgtaaatatgatacttacctttatacatatcaattgctaaatcaatattcatttctgatgatcctaaatcataaaaacataatgcatcatcatctaactgattaatcaattgtttaatctcatcatacgaagttccaatttcaccgtttactccaccataggcaatgacatttatgtcatttgtcattttatttaataaatctttagttcccttagctatatcttcactatgactaataataactatagttgtcatcatttcaactccagtcaatcaattaaataacgaaattaattttttattaaagtgaatcttaatcagcgtattttcattataaaataacttatctgaaagcgcgaatgtttgtgtatcagacaaaatattagtcattgacttcctatatattaaaaatgactgagataggtatccaacatcataataattgtagctgtgttgctgaagttataatggatctcaccttttttcaagtaaattgtaagtgactaaaagtggtttccctgttctaggatcttttcctaatactgcatctatattaaacacactttctaatatctctttagatatgacttggtcagtaggtccattatctataatttgtccttctttcatgattaacaaataatccgaaaatcgaattgcctgattgatatcatgtaagaccataacgatcgtacaccctacttctttattcaactgttgcaccaattgtaaaatttctaactgatgagaaatgtctaagtacgttgtaggttcatcaagaaaaataatatctgttttttgtgctaaagccattgctatccatacacgttgtctttgtcctccacttaaatcattaatcgattgatgacgaaattctgtaatgccggttacgtttaatgaccattcaatttcatctttatcttttttagataatcgtccaaatcctttttgatgaggaaaacgtccatatgaaacaagttcttcaacggttatactgtcagtcactgttggagtttgaggtaaaatggcaatttttttggctacttcttttgtagattgatgttgaatgttttgattatcaagtaatacttctccatttttcacttcaatcagtcttgagagtgcttttaataatgtagatttcccacaaccgttcggtccaataattgatgtgattttaccatcatgtatttgaacatctaattcttttataattgtcgtatttctatatcctatatctacttgagaggcatttaaacgattcatatataagccctacctttgtacaaaaaatatttacgacatctattgataatcgttctcaattaattattactagtataccatttatacacagttttgactattctttttactatgaggcgattataaaaaataaccctaaaaatctgagatatacataaaacacctcaaatttttagggacccttttttattcatcgattaaaaaaccatttccataaacatcacgcacgtcatgaataaccaagaaagcattcttatctattttttttataattcgtttggcacgagttacttgagttttagctacaacaacatacaaaacgtctttttcttctctactataataaccatgtccattcaatatagtaagacctctaccaacttgttcatcaatggccttagctacctcttcaggtttgctagaaataattgtcattgctttttttgtattaagtccttcaataacataatccattactttcgtgcctatataaagtgaaatcacagttaccaatgctttacttaacggtagcactgttaaagaaatggctactacaattaaatcaaaaaataataatgcgtatgctgtactaacatctaagtatttattagctattcttgctaatattgttgttccagctgtagtgccacctgctaaaacgattattccaatacctagtccaacacttgtgccgccaaatactgcattgatgatgacattacctgtttctacgtgccatgattctgtaagacttaaaaaaacagaaataagtacagtagcaataattgttaatatcgtactttttttacttaaaaatttatacccaataacaatcaatattgcattagcaacgaagttagtgagcgctggtgaaatatgaaaagcgtaatataatacaatagcaatacctgtgacgccaccttcacctaaattacctgatataacaaatgcattgacccctgctgaaaagataaaggaacctagtataactaaaagtatatttttgttcaaaaacacccactccttttacgactataacgattaaaatgttagcacagtctcatcatttcctacaatatacttttaaaaattaaatgtattaataaatgttaaatatcttaaaatataaagatttaatttaaatatgatacataatcatctttaaatctaatgtactaataaaaaatacgtgtgaattttctgaatttttcgtttacttataaatattagtttgctatactatgtataacttcttaattacaagaagttatctcctttgtgttgtttatagtaacaaaacaaattttgctcgaagtactgtgacagtacctagtccttaccgttacaagtacattaatattcatttcccataaaaaccaagtatataaagtgtctcctcactttgcatgcttggtttttatcatgcaataaaatgaataataaaaataggagtgacatagaattcttttcgaattcaatgttcactcctaatggttactataaaatgatttaatttttaataccttaccatgcaaataaaccaacaaatgctgcagtaagtagtgaaactaaaatacctgataataacatcatcggtacatattttgaaacaaaatctgatgttttcttatcaactataccctttaatgtaccaacaatcatcccaattgtagagaagttggcaaatgaaactaagaatgttgatatcactgcgcgacgatgtgcactatatgtatcaattacttttgtaatttcacccataactacaaattcgtttgtgacgatttttttggacatctgttgtgccactatccatgcctcgccccatggtaagccaagcaataaagcaaatggatacataaagacacctaagatttggtttaaaccaaagctacctttcagacccatccaactgcctactaatccagtaatcaaattaataaaacgatctaaaaaatcagccaacgctacaaaactaataacaaaagcgataataattaatactaatttacccgcatttaatactgaatctcctaaaaatgagaagaaaggttgacgttcaattttttcatcattattaatgctatagataatatcttctttttcttcaacagtgacaggatttaaaatagaagccacaataattgcattaataatatttaaaggaatcgccgttaacactaattcaccaggaatcatttgaacataggcacctacaatagctccagaaatagaactcattgacatcattgcaactgttaatacacgcatttcattcatacgcttaagttgttcgttagagactgcaagcgcctctgtatttcctaaaaacatcatttcgataccaaagaatgattcaaatttaggttgacgtgtgattttcgcaagtacaaaaccaattcctccaataattttaggaagaatattaaaatacataagaatatcaaatagtggaacaactaataaaattggaaataatgcactcactgccatatccatttgtttaccacttgtaaaactactgaatgcaaaacctgttccagtatgagctgattgaataatccaagcaatggcagctgctaaaccttcaacaattgatcttccaatttggaaatatacaaagaaccatgctaagaatacatttaaaagagctaagattaatatagatttccattgaatatgtttgcgattcctagaaaataaaactgctattcctaaaaatacaagtaatccaatgatatttattagtaaaaacataagacacctacccacattttaaaattaatatgtatcacattacccttaaatagaaccgtactattttcataaaatgacaactaacgttctgtaaaaagtacatttaacattataccatgagaaaatgttcgttaaaataacatatttaataaaatagttgtctatttctttttttgttatttatcataaacaccatttaaacttaatacggttatatagaaaaagaatgggaaaacgaatttaaagtaactatttcccattctttatattatttgattttatgattcattttcatgaatatcattattaatatagtctgctataaattgagaagattgacctttttcaattgaacaaaaatcattatagaacgcttcaattttatctttatatttttctttatgtgtatctaaatgttttaattcttcagcaagtttaaattcatctgtaataatttctcctggtaaatcttccatataattcatatagaagccacgaagacctttatcgtatttttcaatatcataagcaaagaaaaattgaggacgtttcaaaataccataatcaaacatcactgacgaatagtcagtaataagcgcatcagatattaaatataattctgaaatatcattataatttgaaacatcaatagcaaaatcatcgtatccagttagatctaatgcatttgcaataagataatgcattcttagtaaaatgacatagtcatctccaatttgctcttttaaattagctaaatttattttcaaatcaaataaatattgaccttttttaacgaattcatcatctctccaagttggcgcatacataataacttttttatctttcggtaaatttaaatcttttttaatttgttctatatactcagtatcattttgtcttgtaactaatacatcatttcttggatagccaatttcccaaattctttcttcatccatccaaaaagcagatttaaagatatccgtggaataacgatttggagatactaaataattccaacgagatgcttctgtgtaaaaattctttttataatttgctgttgttgttcctggcattcttaccactttcatatcatttgctaaacgttttaacggtgtgccatgccaagtttgaatatacacttgattctcttttttatttaaatacaatggtaatcgagcatttgaaatccagtattttgctttagcataggcttcataatattctttggatccttttttcactttagttgcatttccaggaataatattgttattaggcttagaaaagacccaaatataattatattgtggatagtgttgttgcatatattcatatatgtactttggactatcactgtaatttttgccaccaaatgactcaaatacaatcgtatgtggatctactatattttcattatctgtaagttgatatttagcacgttctttcatcttactgtttgtaagaatacttttaaataaacgtgtttttttacgtaattcattcacatatcttgcattctcaatgtcatccatagataaaaacatgatttctagattatataacaacttaccatctttaatgatattccattttagtgcttttactactttaactagagtgtcctctaaagcaatatatcttgctttaatatctctaagcgaaggatcaaacccttttttaatttcatttttcattctttggactaaaaatttcttaacttctttatttgtagttctttgcatagcatcaaagaaactatttgtatagtcttcaaatttatcaataaaatcttgatcacttagtgtattaccattaaatggatcatatacttcaccacgataataaaacggaaaattaacaattctaacaaagtgttcagcatatttcagatactctaatacaaatgaattatcagtaaaaatgcttaaatcttcattaaatttaatatcatgtgctttaataattgcatttctaaataaaatattacatacagtttcttttcttaaaattgaattaggatatgaatggtgtgatcgatactgcaaacgtatcttatccttgtctacatattgaggacgttgcattgtaaatttgtgtatcggcgcaattaatgtatctaaaccattgatatgatttaaataatattcaatagcatatgaggctaattgatcatccgcatctaaaaacatcacgtattgaccttctgctgagtccaaagcaatatttctagcatgtgcatgaccagtatttttttcaagttgaataaacgtcacatctttatcataagatgctaacgttttatttaagatttgtgttgaataatccgtagaaccatcatctacaataataatctcaaaatcttgattcctttgattttttaagctattaatacaatcttcaatatattcttcactattaaaatatgtaataattattgatagtttattcaatatcattctctccaattttatttatgtttattcaattaatttttaagcaatgggtttgtgtactaactatatcttatcagcctaagattttttcatctacactgtaaaattatatattactttatcatcgtgatatttagatgttcaatatccattatttatttaaattttgtgtagtcacaaattgatgatatttctcatgatatttcattaattcgtcatgtgtaccttctcccgtcacacgtccttgatcaataaaaataatttgacctgcttttttaatcgtagagagacggtgtgcaatcactatcgttgttctacctttcatcaatacttctaaagcttcttgaattttttgttcactttcactatcaagatttgcagtagcttcatcaagtaacagtatatctggatttttcacaaaacttctagcgatatcaatacgttgtcgttgacccccagacagttttaatccacgttcgcccactaatgtatcgtatccttcatcaaattgcataataaagtcatgacaattcgctaattttgcatatttaattagttcttcatcagagacagtacggttaataccatataagatattatctcgaattgttcctgtcatcatagagtttgactgcatgacatatccaattttgctacgccaattcgtaattggaatatcgtaaatactttcattaccatatgtaatatcaccattatcgatatcatacatacgttcaattaaattaaaaatagtgcttttcccagaacctgaaggaccaacaaacgcactaatatcgccctgaggtatacgaaatgatacatgatcaagaatcgtttttacatcatatttaaattctacgttattaaattcaagtgctccattctcaatgttgatattagcaatggggtttaactgttccatcggttccacgggttcttgcataatttcataaatacgttgacttgcgcctacagcttttttgtaatcagtaactagtgtagataagttcataagcggcatagataactgcatcacataaaaaatcatagctattaaagcacctgctgtaatagcaccagtagcaattctaattgcaccaaatcctaaaataatggctatcattaataacataatcacacttgaaataggttgaataatcgctactatttttgcctgtcttaaacctaatttatatatttcatttaagttataatgtgcattatttaattctttttgttcagtattagaaatttttactaaacgcatttctgtcaatacacgacctaataatccactaaaattggcaatttctgcttgggtatgttttgaaattttttgcatacgtcttccaagtggaatcataatacccataaatattggaatagctatgaaagtcagtaaagtcatttgccagtccataataaacagcataataatggaaccaatcaatgtgataatagctggtagtaattgtggtaatttttgagagataaaatcgttaatgaccttagtatcatcagttaaacgactcatcaactgaccactttcatttttgtcaaaaaatggcattttcagtttaatcatatgctcccacaataatgaacgaatgccataaatcattttttctccaattttacttaagagataaatacctaaaccgctaagtaatgcattaatgataaagatacttgcaaatagaacgacaatattccaattaatattattagtagaaaatttatctactaagcgacctgtaaacagtggaatcaataatccgctaagacttcctaacgaagaaatgataacagcagttattattaaaccatagggccaagacaatcgtttaaatagaaaaaataatggattgtgttgtttcataaataaacctctttagtcatcaatttgtatttgtatttttgatattatatttagtgtttatcctaatttaaatgtattttaactggtaattcggttgttcttagtatagcattttatttaaaatgttttatcacataaaaataggagtgccctagaattcgttttgaattcactgttcactcccaaaaggatgggtcaaatcaaaaaattattgttatctacttgatttaaccaatgattgagacatagctaaacttctaaggtgtctatatgtgtctttaataaattattatttattttgcatcttttccgtatagctcttgtttaattttagttgttgaaataccctcagtgcgttttagatatacaacttcacatttgtcttttaggaagtcaaatttaccttcccagtcatggcccataacaaaaacatcaacatcataacgatcaacgtctgtttctttttgaccccatccatcttctggaatcactaaatcaacgtaacgaatagattctaacatcattttacgttgttcaaaatcataataagattttttatttttaatttggttaaattcatctgttgataaagctacaattaaataatcgcccatttcacgagctcttcttagtaattctatatgaccataatgtaataaatcatatgtaccatatgtaatgactcttctcatatttcctttctcctttacaaatttttaacattaattaataatcttaatttagcataaatatatttaacataccattaattttatattgacatgacttttcatcatttacttattcatcatacgtttcaatgattgctttccactaaatactaattttttaggcattacttgtgctttaaaacgtaaaaaaccaggtcgcccaattcctacctcaataagtgtatgtctccataattcataggtctcacgtgtccaatgagtcgcactttgctctacggcttgtactattctaaacaatgcttctccagaataatttgtacgttgcatatctctgatatattgagtgattttgtctataatttgaagtgtcactttactgtattttattaaataagcttgaatgagatagctgacaattaagtcatccattcgataactataatatgctttttctttgacaagtaataacatatccatgacttcacgtcgaacttttctagcatcttctaagtaagatataaatgtatctgcacgttgatctgtaatagaaccttctcgctcattgtatccatatacgataaaaggaactagctggatatcccttgacattaaataggcacgagtgacaaatgtatgttcttcacaaaatactacatcttcatcaaatcttagtatattaaatttagctttgaataacttgccacctggtccaatagattgaagtatttctggcgcttctgctaaagaaaccattgcttcacgatgaatgtcttcgtgtgttggaatgactttccagtcaccatgcatccctctaccgatttgcccaatcacaatatctagatgattatttttctcataatattgaatcatttgatccatttttccaggtaaaaattgatcatctgcatctaagaacataaaagcatcgatatcatctgacattgcagaaagacccatatttctactttttgccgctccttgattgtcttgatgataaacaatgagatgtttaacttctttttgcaattcagttaacacttgttttgtacgatctgttgatccatcgttaatacaaataatttctacatcatgtgttgtatcaatcgatttaactgcttttcgaattgtattttcagcattatatactggaataataaccgctaatttcattctttcaccaacttttcaataaattttaatacgttttctaagcttttttcactattatatttatgccaatgtttaaataatggttttatttctttttcattatatttaatcttagttactaattcatctatatgtttcactttataaaatgttggaatatcgcgataaaattgattcaatccacgcacctcttcatactctttttcgtcaaacacataaaataatgtaggtttattgagtaagctagcttctattggtagggagctataatcactaataataatatcagccatcatcattagttctgacgttgtcgcaatatgctcactattaggaattgatggatgaagttgattaatgagagtataattgggtaattgcttttcaaaatatactttatctatttgacgattatccatttgattttcacgataagtaggcacatataatgctaatttattgggaacattataatatttttttaaatttttttgctccgtcttaaggtctaatttaaaatatttggttaatcgaggtagacccaatttaagcatttgagtgctcttagcatcaaatgcactttcaaaacatctactcatctcttctccaccgactaaataataatcagtagcattataaacgcttttatattgttgaatcatttttttattatttaaatctacttgatgatccgttaaaccaaaattttttaaagcacctgaggcatgccatgtttggatgatggtctgtccttttttcttatgataccctccgagcataagataatatgtatcaatcacaatcacttttgctgtacttatcgtcttgatatgtctcactatatgactatttccggcaggaacaaaagatacatttttaaattgctttagcttagcccattctttttctttagcaatgacggttagttcataccctttctgatttaattgctcaattattggcataacgtcttcgggaaatgtcattaaaatcgcaatatgattcgattttagtcgtttaaatctaaaaatttggtttacgatagtaataagtgtcatataaatattttttatcactactcttgtcatcatttaatccccttactcgttaataaaataatttataaagaaagagtaggacagaaatacattgattttgtctctactccttatcattttcacatacatctctatcgacatcgtctatattttatatttatttatgatatatatgctaaagagcttgaaatgcaatctaatacatttcaggctctctactaataaatgtaagtattgatttatctagcacacgttttataaaaaatctgcaaaatgatctcgatatctacgatgtaatatagaccctaatacaaagaatactataataatcacaatattataaagaagtaatctccaatgttcaataaagtaccattgatggaataaaattgctgcgcgataagactcagctaaaaagtatacagggttaaatttcataatgtcattaattacgctactaattccagtatcttttggtatccataaaataggagacatatagaataaaattcttagtaatgcttgcataatcatctgtgtatcacgaacaatgattccaagtgttgatgtaaaaagtgctacagaagccacaaagaaaaatgttagtggtacgtaaattaacaattgtacaatatggatagacggcataatgccatttcccatacaaattgcaataataagtgctaataagccaatatggccataaaatttacttgttacgatataagttggaataattgataaagggaaattcattttcgctacttggttaaatttcatagatactgatttcgtaccttcaagaataccttggttaacaaagaaccacatgctaattcctactagtaaccataaaataaatggaatgccatgtatcggttgattactacgaattcccataccaaagacaaaccaatacaccataatttgaagtgctgggttaagtaattcccaagccatacctaagtaattatttgtatttgttattttaatttgaaattgtgcaagtcgttgcactaaataaaagttttttatatgttctttaaaaacagttcctactgccgacattgaattaaaccacactttcaattgtaaattcataatggcttttaatttctttaactactgattaaaatcgttttattataaaatttctaaatcaacgtttaaaatgattcatataaatccattatatatttacgcaacacattagtcgaaaattttattaggatagacttaactcagaaaagaaagtaaaattaatatattgtttacaaaaaagatacaaaatctcatatacactttacactaggttaataaatttaacaactattgagtgatgtattataatctatataataaatcataagaaaggaaaaatcatgagcgtatctgttaacataaatcatgtgacaaaagaatatcgaatatatcgcaataacaaagaacgtatcaaagatgcgttaattcctaaaaataaaaacaaaaccttctttgctttaaatgatgtgtctattactgcttatgaaggtgatgtgattggtttagtaggtataaatggttcaggaaaatccacgttaagcaatatgattggtggttcattatctccaagttctggaaatatagatcgtcatggtgaagtaagtgtcatcgccattaatgccggtttaaatgggaaactgacgggcattgaaaatattgaatttaaaatgctttgtatggggtttaaaaagaaagaaattaaaagacttatgcctcaagttattgaatttagtgagcttggcgaattcatttatcaacctgttaaaaactattcaagcggtatgcgtgcgaaactcggtttctctatcaatgtaactattaatcctgacattttagttatcgatgaagcactatctgttggcgatcaaacatttactcaaaaatgtttagataaaatatatgagtttaaagaagcaaataaaacgattttctttgtaagtcataatatcagacaagtgcgtgaattctgtactaaaatcgcttggattgaaggtggaaagctaaaagaatttggtgaattagatacagtgttacctaaatacgagcaatttttaaaagattttaagaaaaaatctaaaaaagatcaaaaagcatttagacaacaacttgatgaaaaacgttttgttgtaaagtaaaagaggtagagacttaagtgattcataggcttaagtctcatcctcttttattttttcttcttattctgcaatttccaaactttaaacataaatttaggaatactttttatacgacctattcgcttccaatcaataagtaatcggtagacccattccatatttaaatttctaaaaagacgaggcgctctttttttagtaccactaaacacttctaatgagccacctacgcccatcattactgtatgcttaaaattactttcatttttttgaatccattcttcttgttttggaacacccattccaacaaataaatagtcaggattgaaacgttgaattcttttcactacagtttcatctgacaggtcaatatacccatgatgatactcaaaagtaacattaggatatttctgttgtaatttgtgttgtgcttgcgcaacaatttcattttttgatcctaacaaatataccttttgactttgctcgtgtgcaactttaatacattcttccataagttcaatacctggtacacgtcgctttaatggttgttttaatctattagaagctttaactacacctgtaccatccgcaatgatataacttgcaccatttataagctttcgataggttacatgttcagaagcatacactacgatttcaggattagcagttacaataaacaagttatcatttgtattattttcaaaaaaatgtttaatattttcaatcatatccaacattgtcacattatcgaattgtacgcctaatatatctactttatcgttttttttcttttttgaactatacatttacgttaactccctgctttcttaccctctttatatgttgtaatgaatttataataacatcaacttattcatcatatattatttttgtcattgtattcaaaaatacgtctaaagtctaaaggaccagtttatcttaatgatttataatagaagtcatactattaacgtgaggttgattatggattatttgcaacaatttttaactacgactgttatcttaaatatttatttagtcattattatagcaatatcttatatcattattcatcaaaatcgacattgttcttttaatcaatatttagatatttatctaaattatattccagtactgactcatgaaatgggtcatattctatttaataagttaagtggggggcatgctaaagatcttgtcattgttgtacgccctagtgaacgtaaagaaacgttacaacaaggctatgcaataacacaatctaaatcagttactggacaatgtattacgacattaggtggatatgtcatgccaccaatcatgttaatgataggtttttggaccattcattttaactatccaagcttatttttaatcttatatagtttgatatttatgtattaccttattttaacatctcgaaagttgtctcccattatcgttttaatcattttaatttcattattgtattttttattgcaaggcaataatcaatttatgattttttatatcgtagtcctcctatgccatcttatcttaggtgtcctattaggagaagttttgcaatctagttggacaattatattattgactttccaaagagtaaaaacacattgggatggtaatactttagctgaattgacacatttaccaacattattttatagtctattttggattatgattaacggtttctctttatatttaatatacaaatttatgatttaaaaacggctcatcatattcaaattgaatagacgaccgtttgtttaatttttctctacaaatatattctttgcattatcataacttagaatcgtcatagttgtatcattatttataatcatgactttgttggttttatctttggatactatttcaatgttatctccaattgaaatatgcttactggatagataaacaagtaaatccgttctatcgcgaacacgtttaatgtttactatgtctccttcatcatattcaagtaatgagtcattatacttttctttataaatataatttcttggaataactcctccatgcggacaagtttcaggataatttaacagtttatctatcctttctaaaaataagtcagaaattttatgctctaaaatttccgcttcttgatgtacttcttcccaattataatttaatacttcaattaaaaattgttctaataaacgatgtctttttataatatcgagtgtatgagagagaccttctttagagagttttacccctttataatgtttagtttcaacaaatccagctttttctaaacgacttaccatttcacttacagaaggtggttttatatctaaatattgagatagtattttatttgaaacgaaagcgctatcaccaccattagttagaattgctttgagataatcctctttttcttcagttaacatgatttcacctcataaacagtttcatcttattgtatcacgaatggttgtgtaatgtgattgtcttctattatcttacaataagaggaatacatcttaaatttcaatgttaaaccttttatttatacttaaaaaaacctaagacatagcgagttgtcttaggtttagtattaatcattattgaattattaaattagtcagttaaactgtctacaataaccatttcatcatagttaattgcctcacgtaattttaaagctgtcgcttctgtaatctcttcatcactaataagttcagttaaaatacgacgttgctcttttaaagcattcaacttaattttagtaattgaatcttcagaacgtgtgttaaagaagttagatggtgataagttgtctattctcattaaatatccatcacatatcatacccacttctaatttattgtcttcatttgcctcctccacaagtcggcttacaacattataatggactcttttattgattttagaaagttccattaagttttcagtaacacttaatgatgaagctgcatttgtacgtgtacgaatatgacgtttcaaaagtaatcctctaattccaacaataatacgacgaatgagtgaagcttgtctataaacttgtgtacgttcagcaaaacgcatatagttttctagcatgctttccgtaatttcgccttcatctgctaatttttcaagtgtttttgtttctacgttaaaagcaatgcgttgtaaacgttcaagctcttttgaattctcgtcatctttttctactgattttaggaaagttaatttatcatgatattctttaataacatttccatatcgatagcttgtttcaaaggaggaatgtttgtttaaataatcaatcacgtgttctaaaatataaattcttgcttctttaaaattcatacttcctattttaggttgaggtgcatttttcgtaacaaaaggtaaaatgatttgtgcaatgaccaagcttaagataaccattcctgaagaaataaaaagtaaatcattacgatacttaaaagcttcatgattttgtaaatagtaaggtaacgttaatgcgatggcgagtgaaattgttccatgaacaccacaaaatgtcataattaacgcatacatacttcgtttaggtggtttctctttcgtatttgtaccctcatcattcattaatttttggaatggactgactgatagataaaataaaggatatagtacataaacccaaataaatctaaatacatatacagccaatgctactaataaagtaattcctattaagaaaagtaagttatgtggttcacttttaataatttttacaatgacttccggcactaagaaaccaagtatcgagaatacaaaaccatttagtgcatagcctaaaatattccacgtatggttataacttagttgaaggcgtgtacgtgtttgagcaatacggtcacgttcaaaaccatgaacaagtccggctactacagcagcaataatacctgaagcatggaataattctgccacaagataggttacaaatggtgttaacaattgaagaaatacaaacatattaatattttcaataccacgtcgtgttaacgttagacggaatcgaacaagtaatataccgatgaacaatcctacaatggcccctcctattgaagcaattaagaattgttgaatcgcttcaaataacgagaaagcgccagtaacaagtatccctactgctattttaaatgaaatgatacctgcagcatcatttaataaagactcaccttctaaaatcgtcattgcaccttttggtaatactttaccttgagtaatagcttgcactgccggagcatcggtaggacagagaattgcggcaatcgcaaacgctgcaccaattggtaaatctggccatactaagtgaataaataaccctacacctatgacagtagtaattactaaacctaatgccattaacatgacaggtttaatatatcttcgtaaatgtaccctagatacattaacaccttcaacaaataataaaggtgcaatggtcgctagcataaagagttcagaatcaaaattgaattcaactggtacaggcaatataaagaggatcattcctaatatgatttgaataaatgcaagaggtactttaggaataaaagtatgaacaaaggagcttacaataacaacagctagaaatatgagaatcgtttcaaatatttccaaactttcaccccattatttcatatttaatttgagatataagatacattgtcatcttatttattttaaacgtatatagttattatctaccgtttttatgctctcaattcaatatcaattttatcattaaactatattcagattaactaacttgcactttcaaaataattcatttaaaaattattaagatatacaattattcttctaaatcttcaatatttttatcacctagttgttttctttcttcagctctatggtttttaatatcataatacagtttttctcgttgttcttctctttttttagcacgactttttaactcctctcttgtattaaattcttttgaacttaataaaatggaagattgtcttggtgcatcatcttttctatacatgtatgctccagttcgataagctgctctagcaacaaggtgcataccaacagcagacgttaaattaataaagacaatggataataataaacgaacactaaagaaaccttgcaccgttgtaaagtatattaataccccgattaaagtaagtaatacagaaagcgttgaacttttcgtggaagcatgactacgtaaaaaaacatcttgaaattttacaatgcctattgcactaatcactgcaataatacttcctagaaaaataaggatagacgcaatcaactcagtgacgctttttatgagttccattgaatacccgacctcctccaataaatctagaaatagatacagagcttacaaatgaaataatcgcaattaacataattgaatctaaatacgcatcagtaccataaatcacgctaaccaccccaacaatgcacataattacagcactcgctgcatcaaatgctacgactctgtctgctgttgtaggacctttaatcaaacgaaacaatccaataataaatgcaataccaaataatattaaagctcctgtactaaaaaagttagtcatcgcttggatcatcgtgacacctccataattaaacgttcatattgtttaatactttttaacaaattagctttttcattttcagaaatgtctatactatgaataaaaaatttattggttaattttgaaattctaatcactgtcgatccaggcgtaataataattaaaatggttaaaaatgtaatggcccaatcactttttaactctgtttcatatgtgagaagaccaggattcatatcttttgttttaaataaaatatatttaatgatactaagacttgaagtaattaactgatacaaatatatggctaaaaacttaatagctacccatatttttactaaataaaattcttgaccaaagaatcgatgaagtatataaatgataattaatcctataagatagccagatacaaaggtagagaataaaaaagaaccttgatcttgaaagagtacccatagaaaagcaattaagatattcaatacaatttgtctcatttattctcctcctttaaatgtggattaactaagtgatggaagtaagcatcatttgtatttaactctgttgcatttttagtaacattcataacaattggtgccgcaagacccataactagtacaactacagttagtatgccaatcatgcattttcgatgcacaggcaatgggttgtaattaacttgctcgccatctgcatctccaaagtacataataaatagtattctaaatagactatacattgctaaaagacttgttaaaatcatgagtgctaatccaatgtaattaccattttgaaccgccccttggaaaataagcactttaccagggaacccactaaatggaggaactccgccaatcgcgaaaatcataacaataaatgctacgccaaagaaaggctctctctttgccaaaccatataaatacttatattctctataaccagacatataaactaaactaccaataataaagaataataatgtctttactacaatatcatttgttagataaaaaatagcaccatgaattccagcaaatgtatttgatcctaagcctaaaataataaaaccaattgataaaataacttgatatgctgcaattttctttatgtctttaaatgaaatgactccaaaagcaccaataatcatcgtaatacaagacataaatacaagtatggggtgtgtaatatttggatgttgatcaaataataaagtaaagaagcgaattaaagcatatgctcccactttcgtcattaaagctgcaaataaagctgcgagctcagtatttaatactgcataagctttaggtaaccacataaataaaactaacgatgcttttgagccaaatgcaatcataaatacaattgcaatgaccactaccatttcattattgtgaatatcatctaagcgtaatgcaacttgagaaaagtttaatgtccctactaatttgtaaagtaagccaatacctaataaaaataaccaagaaccaataatatttaaaacaacatagacaatggctgctcttaattgttctattgattgtcctaatgttacaagcacaaatgatgcaagcaacataatttcgaacatcacatagaggttaaataaatcagaagttaaaaaagcaccaatcacaccggtagttaaaaataaaataaatgttggtaaataatagcgattcacacgttcttcagcaggtccaaatccatacgccataattaaagtcactacaaaagaagcgactgttaccatgagtaaacttaaagtatcacctaaaaattgaataccaaaaggtgctttccaaccaccaaaatctaaagtgattggtttatgattcatcacataaatcaataaagctagcgaaataagcgtattaaccgtcattgttccaatatataaaatcttcgaaactctatttttattcttcgtaaatacaagtaataatgcacaaagaagtggtaagagaatcggaaggattaataagttactgttcatcatcttcatcctccctaagcacatcaatttctgattcttttgtaacacgatatgttcgataaactaatacaagtaagaaagctgtcataccaaatccaataacaattgcagttaaaacaagtgcttgcaataatggatcgacatagttggtatttgaaccacgaataagcggttctgttacgtggtcactataatgacccatactcataataatcaaattaccagcatgcgtataaatcgaaatccctacaataatacgaattaaatttaaagataatatcatgtatgtcgctaagaatacgagaaatcctatgataagtaataaaataagattcatgatttacccccactcaatgccaacataattgtgacaatcacacccactactgaaagtactatgcctaattcgaaaatcctcactgtagtaatatgcatttcattaaatattggtaaatgaagtgtaaattcactttgatataaaaatggtttgccaaaaaaggtaggcacaattgctgtgattaaagaaataagtgctccaataatcattaattttctaaagtcgataggtaaactgtccaatactttttttacatcgaaagctaaaaacatcaagataaaagctgagctaaagacaagaccaccaataaatcctcctcctggattattatgacccgctaaataaatgtaaaaaccaaaagtaagtaaaatgaatacaacaattttagttactgtttttaagactacgtcattttctttcatcttgacccctccgatctttgtaatttaataatgtataaatacctaaaccagcaataattaataccaagccttcaaacatagtatcaagtgctctaaaatcacctaaaatggcatttacaatatttttaccacctgtgagttcttttgcattcatataatatttagaaattgtttctaaaccatcaccttgttgtgccataaacacaagggttaccactgcgcctgcaaaaatgaatgctacaacaattttcataatttcttttttcttatctgctttcttacgtgaaatattgggtaagcgtgaaaaactaacaatgaataatattgtagtcatcgtctctactacaagttgtgttaaagctaaatcaggtgctctcatgattaaataaaataatgcaactgaatagccaataattccatttaatattaccatcgttaagcgttgtcttataaagacaagtgctataccaacaacactgattgaaatagcaagcagtacttctaaagatccaaagtcagtaacatgcattagatgtagtttcggaaaccctactcttaaaaagccatacgctacaaatagtgaaaacactaaaagcgtaatcacattgtagtaatttaatcggttcgtcattacgccacgaatactacaggcagcataatgttcaaatacactataagctttacgatagaaatttgtaatagatgctgttttgattgagcgatgcgttaacactttccaatttacttttgttgctaaaataattcctaaaataataacaatgatactaaaaataagcggtaaattaatgccatgccactgggatacatgtggtgccatcttatcgacttggatacctaagtttgtgacatttcttaatgcaggtaaaacaatgggatgcgtaaaggtatttgggataaagaagataacaggtagcatcacagcaaagatcattgctggtaaactgaacaaccatggctcatgaatatgctttttaggaacttctttttcattaaattctccccaatatgtttcttttagcatgtaaactgcatagacaaacgtgaatatacttgcaatcacgcctaatgccacaattatgatggttaaagttaaactaaattgctctaattcaatagatttaactaaagaatcaaaaaacatttctttacttaaaaaaccatttaaaaatggtacgcctgccattgataatgcagcaagcgtcatactcacatgcattttaggaaagaattttctcatgccatttaattttctaatatctcttgtgcccgcttcatgatcaataatacctacgcccataaataacgtacatttaaataatgcatgattcatgacatggaacaagcctgcaaataaaattaatgtgtaaattttagccattggtccgcttggatgctgcgcaatacctccacctaaaccgaccattgtcataatcatcccaagttgactaactgtagaataggcaagaattcctttcaaatcgtattgtcttaaagctgtaagagatccaaacatcattgtgattaatcctacaaaagtaacaatataaatataactattacttaagcctaatacaggtgtgaatctaaaaagtaaaaatatacctgctttaaccattgttgctgaatgtagataggcacttacaggggttggggcagccatagctttaggtaaccaaatatgaaatggaaattgagctgattttgtgaaagctccaataagcatcataatgatcattggaataaataaaggatgctcgctaatatgatgaccttgcgataaaatttcagtaattgtattcgtacctgtcattatgtacaacataataaaacctgttaataatgctaagccaccaaataccgtaatcataaacgactgtattgcacctagctgactatttgcattactataccaatacgaaataagtaagaaagatgaaacacttgtgagttcccagaagatatacataaggatggtattattagatattactatacctaacatactaaacataaataaaagtaagtatatgaaaaatctaggtaagttatcaccattaggtgttaaatattgggtagcgtaaaagaaaacagctatccctataatagaaataattaaagcaaacattaatccaagtccatctagtcttaaatctaaattcaaatcaatggctggcatccaagctattttaaaagaaatcactttctgatgaagtacattaggaatttgagataagaagtaaacagaagcaatcactggagcgaatagggaaatataacctgcatagcgtcttagaggcctaataaataaagtgattagaaccatacctatgattagtaaaagtgcccctagtaaataaactaaactcatcaaagccctcctttttataaatttaaagcaataattgtatgatgatcttctttaggtgacaaaccaataaatttcaaagtttcatgcgtagtctggtgtcctaaatatttttgaataatcgcaatagaaacacccgatttataagcatgatatgcaaaagttttacgtagagtagttaaaccaatatgtaaaaggcctaattctttagctgcgtggtgaataattcgataagcttgctgacgtgaaagttctttatgtgtacgaagagactgaaataaaagatgatgatctttcaactgattttcacagatatatgtatcaaattcatttcttaaatcagaaggtatcataattttgataaatggagcgccttgttgaatccaagctgtctttatttctttattttccttattctttatatcttcaactttaagatgtaataagtcagtaagtcgcatacctgtatgtatcgccagtttaaataaaagataatctctgtctgatttcatttgtaacacgtgatacatcttcttaatatcattctttttcttaataggttctacataattcatttatccacctcaaaaaagtttcttatttaatgatatatcatattttagtaacattgaaatatttcgctcaactttttttgatttcaagttactttttttaaaaatattttcgatatataaaatgtaaggaggtgaaagtaagatgaacgaaattactcagttatctgttatttgtactcacgttacacatgatacaaatggaaaagctaaagaaattaaacgtcgatttaataacattaatacacgtgcttctgaagcagacatcaaatcatttgtaacaacaatttcaaatttgattgaagaatctttcgataaagttgaagttgtaaaaacccaaggattagtttaatgaatgattttattaaaaaggaggtatgaacaatgtcaaaaactttagaactcatatttaagacaactctaaacaaaacagctaagttacaattaccacaaatttcagcaacaataacagaagcaaatgtacaatcagcaatggaaaatatcattaagttagatgttttaagatttaccagtggcgctccaagcaaagtcgcttcagctcagattgtagataaaacaacaacagttttatttgaattaaattaattgatatagtagacgtatgttacaatatcaaattttacttcacgtcttctaaacagtagattgagaatggataaagcgttctaaaagagttttatccgttctcttttttttagtatagaatttttttataaatttacgtataataatcgtatttgatagtaaaaataatggaggaattacgtttgctttttttatttatacttggaattattgctggtatgatggttcctattcaaacatcgattaattctagattaggtcgatttacagagtcatctttttatgcctctacgatttctttttttgtaggaactctatttttattattacttaatatcatttttaatatccaaatgttctcaagctcattttatgctggtcactctattgattatcattggtgggttggtggcttgcttggtgtatgtttcttaacaggtaacttattacttcttccaagattaggtgcagcacttacggttgtgatgacagttgctggtcaaattataatgggtgttattattgatacattggggttacttggggccaatcaaacatcttttactttttttaaaggtgtggggattctcgttttattgttcggaattcttcttatgaaccatctacctaaaaataaacttaaagataaaagaaatatctcactttatatttggttgttaattggctttattttcggatttgcgcctccgctacaaactacaatcaatagcgggctttcaaagcaaatggattcttctttattcgcttcactagtttcttttactattggaactattgcgttatttattctaacaataatatttaatagaagtctaaaaattaaactatcacaacagcatctcggtcatattaaaccgctctattttattggtggaattttaggcgttgtattcgttacatctaatattatattaatgccttatttaggtgctgctcttacaactattgttgcaatgcttggccaaatgataatgggcgtcattattgatcactttggcattggtgtacctaaaaatgaaatgactttccgtaaatttataggattaatcgctatagcaattggtattgttttactacgtttattttaatggctactaaaattaaacttttatctaaatcttcgtcttcttaatgcaataattgagaagacttttttgatgtcatcatttcgttatgttgtatttagctctaaacttgtataataaatgcatattaatgtttagaggtgattatatttgaaaaagtttttattccccttatcaataatgttaaccctcctccttctccttattatttcgtttggattttatatttattctaaaattcctaaaacgactcatttgagcaaaatagaaacgatgactgtaaaacctcattactctctttcttttcaaggcgttcagcaagctaaacaaagttatacactttattatgagccctcattaggcattagttcagatattctagtaaaaaataatgaggttatatctaaagatacacccatatttaaatattataatccgcacatcgaaaaacatattcttgcaaaaaagaaacttttatcttcaatacaacactcaaataaaatatcctccgataacttcaaccaacaagttcaattatctaatgatatactcaatttacaacaacaacttcaaacacgcatttatgctcctattaaaggtcgagtcactgtacttcagcctttcccttcaaaatctcatactgaaattatgcaaattaataatgatgaacgaatcattcgtgctaaaatcaaggaatctcaacttaaacaacttaaaaataatcaacttgttcaagtttctattaaaaacactaggcaatttgaagggaaaattttatctatttcttctattccttataaaactgagacctcttcctctttttattatgtagatatttctacagatccttcctaccctattggataccattttgatcttcacttaggaacaacagaatatgaattacccgataaagtcatttacaataaaaattatgttctagttatacataataaaaaaattataaaaagaaacattaaatatattaaaagtaaaaaaagtgggtatattatggtatccaatggattaaatattggagataaaattattacgcatccttctacatctttattagaaagcaccgaataatcttttgttttagcatattaaactttaattttataatatggagcatcataataattgttcttaattaaatcttttataaaatttgcttatttttataaacaaagtattaattaatcaaaacattgttttattaagtacattttcgtttactttctaattttatttagttataattaactaaataaaatagaattaaattaaattaatttatttaatctaaattattaatagcttttttaaactaatagatgacgttatatatagataaatttaacggatgcataaaaaatagagagaatattagttggggaggtcttaaaatggctatttcaaaaatcaatgactgctttgaattattagcaatgattacttatgcagataaattaaaaagcattattaaaaaagaattttcgattagctttgaagaatttgctgttttaacttatattagtcaaagtaaagaagaagaatattatttaaaagatattattaatcacttaaactacaagcaacctcaagtagtaaaagcagtgaaaaatttatctcaagaagattacttcgataaaaaacgtaatgagcatgatgaaagaacagtattgattcttgtaaatgcaacgcaacgtacaaaaattgatgagctacttaatagagttaacaaacgaattgaagaagctaacaaagaaacagaattataatagtaaaccataaagagactagaactttaaaaacctagaataatagcccgtagataacatttgtctacgggcctcttttatagccataattcatattatataatattgttttctgtagaataacttcattctaatatttataaacactttttaatcattctttatatctagaataccgctctttagattgttctgtttttttagatattcgattgtagataattttgactctatgcttacaattttatatcaatagatttgtagtattagatgcatcatttttttctacaaaatttaaatataatgttaaaaatttctcttcttcttctatatgaggtgcatgccctgattcattaaataaaacataatttatatttttaaattgattttcaaattgttgattctctttattggtaataattgggtcataacgtccttctactatcatagttggaacattgatttcatgtgtgactgtatttgattgattctctgtatctaataaggctcttgatgctactgcactatcttcatcatcttgtttactatataaacgttgacgttgaaaccacttcattgcaacatcatttttcttataaatatatggaaataatataagtaacgcttcagatttattaaaccccgctactttatcttggtgctcaatcattaactttgtaaaaccatgaacaatatcttcagatttagaagatataattgttaaagatcgcactttatctttatatttttcggtaaaagcttgtgcaataattccacccatatcatgtcctaataaatgtgcgcttttaatacctaattgctgcattaacatagttaaatctttaatgtgatcatttaagttataactcataggatgtgtagattttccatggcctctcacatcgtaaacaatgactctatagtgttttttcaattctttttttaatgagtaaaacccagctaaattaccatctaaaccatgaattaaaataacgggaatgcctgtacctgcatcttgataagctatctttatttgattagacgtttcaatttttttcatatcggcacctcccttagtatttactatacccactaaaacatatttaacgctataaacatgtatacaattaattatttttttatttaaaaatttttatataatttaaataaaaaactcaaccctattcatcatggttgagttaaaatcagatattttattaaatacttcttctagatgataatcgtatagtatatgtaacaattaatacgacgataataatccaaatgataagtgaaacagtttgagcgacatttgaatttacaataacagcatcaatcgtcttttgagagaataataaacctactgctgtatattctaatcttttaaaaataaccccgcataaactcattataagtcccataaagaaaataaattgatgactatacatagtaataggaacaatgcctatagtgagattaaatgcacgcataataataagaattaaggcaataattgcaatcatatagcctatgattatctctgtgcgattactatataaatattttttccgagcaatttgtatatgaataaaaatagtaatcgggaaaataacaatacaataaaacaaagataatatggttgcagcttggaatggaacgtattgcttatcatataaatatgaaattaaaataaaattgataataaaaaatataataggattcaattgtaaaccaaataaattccgttgaataattaagataatttgagccgttgcttttcccctaaaatcaagataatcttgcttttttgcttcagattttttaaagtcgttacgtatattttctttaatgtcatcgataagtttagggggcatgcctttatgagtaaaataatcattcacattttcaagtaataatttatcgtttgatcgcatatgttgctcctttatcgaatgcaagttttaaaatacattcaattcattcatttcaacattttatcatagatttcaattgatttcttttcgtaaaaaagaagtaggataacgaattccagatggaattcgttatcctacttctatatatttcattatcttttaaatgaaatcgatgatacgtaactttaactaactacttcattacattatttattaatgtcaatacgatatagttttaatactttgtctttaggtgagcttgaaccaaattgatagcttgttttaccgttttgaatataagcaaaattgccacttaaactattatattgaacgcgtttaatggcttttttacctacactttgtgctactttttgataagttggaccattggcttgattataagtcattgatactctagttacataaccagtattttttttaccgattgcagtaacaactaatacacctttgtttgtatggaattcatagtatttttcttgattatttggattatatgaataaataggtgtgccatagtgattaataacatttttaattgattcacctatagtcacattttctaatgttttttgaccttgagttaattgttgtacagtctgaatcgaattaccactagctgcttcagcatgattatagcctactcctgtcattactagtccagaaactaatagggctgttgctaactttttcataagcactcgctcctttttcttttatgcttaattacagtataccctatttatgaccaaaataacagaaacattacaaaaacattacaaaatatttcatttttataatgcattaatattggtaaacaatactatttagtgttgaggcatatgtttttttataaaaggtgtcacatcatggataaacttctcttgttcttcttcaaaaggatacatgcttgacttcgaatacacttcgaaatgtacatttcctattaaatctgctacttctttagattcaagagatgttattctttctccataagcacttgcaactataaatgtgggtttagtgatgtactcaaatacttctgcaattcctctttgtttaaatacttcatctactgcttctgtctcttctttagtagaaattgaattagtatcttcgacattttttaagaacttattcactttacgatgtttataatagcgatgtttatctaaaaacttctcttgtttatcttcattccagttacggattttatgtgcgtattttctaaacaatcgttcttctggtaactctccttcaatagatgtcggattgatcattgttaacgaagatacatactctggatattgctttgataaatgcgcaataattgtagcacccatttcatgaccaataaaagccgcttgatctatgtagagataatctaataataaaataatatcatctgcaaattcattgaatttaatatgtcgtggtttatctgaatatccatgaccacgtaaatctaataatacgacttgaaatgtttttgaaagtgcatgagctaaattttgaaaaattgaagcattttcaaacgcagtatgtacaagcactactgggtatccttgtcccattgtattgtaatttaatgtaaatccaccttttcttgtaaataattccatttaattatctccttttttttgtttatttatggataaaatcgttaagagctcttctattgttgtaatgatataatctacttcttcttctaaaggttctaattcagcattttcttgtttataccaaacacttaccattcccatagcacgtgcaggagcaacatcatttaaggcatcatctccaacatacataatttcttctggtaagacgtcaagttgatcaatcatatcttcaaaaatacgtgggtgaggttttcgataacctactgtttcagaagttgataaataattaatcacgtgttctattcctaatgaataaatccgaaattgtttgatctttgatttcccgtttgcaattacacctagtaaataatcatgctctgacaacttttcaagtgtgtataatgtatcgtagtatggaaatacatatcgatagaaatgcatttcgaaatcatgaaataaatctttccatttcaatctatcgatgtgaaattgttttattatctctttatatacataaggtttatcgttatcttcatcatcatctaattctataaatttatgtttaaagtcagcaagttgtacatgtacaaaataatcatgaaaacgttcatattgttcttctataaatttatctcgagacttagttctatccaataatgttccttctaaatcgaacacaactgctttgatttggcttaagtccatttttatttacctcttatcaatataattattcttattttaataatttttgttcacttcactaacgtgttgtattagattgagtgactaaaatataaaataatatgggtatcccaacaagtgataaaataatacttgctggaatttgcactggattgataaccatcttccctataacatcagcgaatagcatcgttaatgcacctatcaatatgtttaatgtcatttgtatagcaagactatattgaaaataatatcgtctaattaattgaggtacaatgatgccaataaaacctatcacacctataaacgctactgctatagctgtcataatagatgttaacaaaagtacaataaatgttatccattgcacatttaaccctagagacttacttttagcttctcctaattgcaagagcttaatgggtgtaactaaactatatatcacaataatgattggcaaagaaaccattgtaatataaacgagctcattcatttcggcattcgcaaatcctccgaaataataggctaacatacgattcgtacgttctggtttaatgagtgtaagtatatatattaatgcattaaaaaaagcgcctaccataagtccagatatgatgagtactctaattggaaaatttctagacaatacgattgtcattataacaacaagtaaaagtgtcgtgatactaaaaatgatagaaaaaattggaataaatagaaaagatacgcctaaaaatatagctaaacttgatccaaaagtcgctccactcgctaaaccaagtgtaaagctatctgctaaaggattatttaataccgtttgaaataattgacccgtcaacgttaatatagctcctaccataagcgcctcaaatgttctaggaactctaactttaaaaaaaatcatttgattaaatgcttgatgtaatgaccctaaatcccaaaaaagacttatagccattatgatacataagaaaagtatccaaactgaaaatgttaaatatagatgttgtttcatttccactcacatttcaattattatttatttcctatattacaatgaatatatccttacgactaataaaaataagattacaaaatgattctttctctgttttgctcaatttacaagactctatgttgtataaaaagcctacaacattgtcaatatcgttgtaggcttttgaaaagtctctcatcttaacgttttaacgtttataaattgcatcacgtaattctttcataccctcatctatacgaggtcctggtcgtgaaatttcgtcaccattgactgtttccacacgttcattttttactgcgttgacttcagagaaaccatcacgttctttaatcacttcataatattctttttttgaaatcccttcagttgaaattaaaatatcaggattttttttaataatactttctttatctactgctttccatccactaacatttgaaaatacattttttgtatctagtttttctatcatatcattgaaaaaagtttcttttcctgctgtatatatttcaggttttgaagacacttctataaaaacactctgttttttatgatgtgctggaattgattcaattacttcttgaacattatcttttgtttctttgactaactgtttcgcctctttttcacgatgcgtcactttacctacttgctcaaatgaatcgtagacttgattcaaagactgagcatctttaatatatactaccttcacaccactatcagctaaactatcaagtgtttttttagcagatgatttttgagattcatgagctaaaatcaaatcaggtttagcttttaagagtgcttctttatttaagttcattgcatcaaattgttgcttgcctttttttacgttttttggataatcatcaactgttgatacacctataatattttttccaagaccaagtctatataatatttcggtattacttggaatcaaagatacaatacgatgatatgtatgggtattattattgtgatccgttgtttcttgctcagttgaatgcgtagaatgatgtcctttttcgctcgattggttttgtccacacgctgctaaaactaatgctaatgtaaataaaataatccacagcttcttattgttcatttataaaccataccttcctttcacaattttgtttatttcatatatttatcataccaaattatttatatcattaatttaattctataaatttttattgtgtaattttatattattgattaaacttaatgatttaattctattttaaaataaaaaagtaaggaaacagatttcaaaataaattctgtatccttacttttttcatactatacagtagctattttaggatttgggccatacttatttgtcccctcatcactatcttttagtgtaaatgcaaaagtgatcacaagaataataagtaagactaaagacatagctgccaccataattcctaattcaagcgcaatcattccgttgaaaacaccatcaactgaaataccgtatgttcgatctacaatacttgaaatttttctaattaatgtaaatattaaaataataagaggcagaaccattgtgtgccctgaatcatgtaaacgacgcaccgtcatcgtaaacgttcctataaacataatgatatcaatgatttcatacacaatatcaaaaaatgtatgccctccatttaaccccaaagtaatgatattaaaaagtaaactaatgatcactaaaataatacaattagctaaaatagcaaaccaataatgacgtcttctagttcgactttttacattaaaataattttgccaaaataatttgaatgcttctatcatgtttaagctccttttatttatcaaatatattatacatatatcatcacatattatagaacttaaaaacatcttttattaaatatcatttcgaatcgcatcagcaatatactgatttaaattatcgtgtcgtttgttattaattgttttagcaaatcgctcatcattctcataaatcgaggcaatatattctaaaaattgttcatctacattaggtacttgtgttcgaagaatatcttttagttcaaaaattgcttgtttaacctgtatatgatttattttatagtttgcaatgaataattcattcattttatcaaagaatgaatgtaacctctccattgttctcttattattttgttgtttttctgtagaattcaattgtttttgattctctttaaaagcttgataataaggagtatgactatatttcatttcagcttctttctcatattgatgttgtatattatcattattccatttactcatattaatctcctcttttctatgattaacgagatgatgattaagaaaatgaatcattttgtttaattgatctctttgtgcaacaatacactgataattattttctaatattatatttttctcttctatactgttactaaaataaagttgaatatctgctaatgataaattcagttctcttagaaattgaatggtctgtaatttagagatatccttagaagaataatagcgataaccattagatgcaatataagttggcacaagcaactcaatttcatggtaataatgaagtgtgcgtttagttacttcggtaatatgactcacgtcattgggtgtaaagtatacctgattttccattctgacatcctgcctttttcttaatctatttgattcacttctcttttcatctctctataaaagagactaagctatgacgtcacgttaaggtcaatccatatttgtaaaatatggatctaagaaatgatatctttgttcaatggagccattaaaataatttttcccaaaattatctagtaaagcatgaaattcatttgcatcttgatttgtaaagtttgaaggtaattcaacatgtctttttaatttatcgtaattctcagtattagcataaccgagttttctatataaccgacgtgtataatgatcaggaataaattcaaccctctcaaaaatgtagactagcaatacatctgctgtttcacttccaataccatgtagtttaagtaattcatttcttaaatgttctccatatacttcattaattttgcaataatcaaactgatattgatttaaccagttgaataatgtagaaattgcttttgctttattgttatagaaaccactagagcggattaatatttttagttcttctatcggcagatctaatatgttttgaggttcaaaatgggttgcttctttcagccgtctaagagaaagtgcagcattattccagtttgtattttgaactaatatagcacctaatataatctcttcacgtgtatctgctggccaccatccttgaggacccatatgttttaataatgctttgtaaagttgttctgtagtcatcattgacatctttttacctttctataaaaaataaacaccttcacaaataaatattcgtaaaggtgcttttaatttaaaagtatttatattacattgattctggtgctgatacacccactaatgctaatgcattatgtaatgtaattttaacagcttcaataagagcaacatgtgcttttgttttttcaatatcatcagataataccttttcagcattatagaatttatggaatgctgaagctaggtcttgaatataattagttaatcgatgtggtgcacgactttcagcagcactctcaattgtaggctcaaactctgctactttcttcaataaatcaatcgctttttcatttgtaatggtactaaaatcagcgtttttgtctatttcaatccctttttctttagcttgttttaaaattgaacaaatacgtgcatgtgcatattgtgcataataaattggattatcttgagattgctcttttgcaagttccaaatcaaaatcaaagtgcgaatcaggactacgcattgttaagaaatagcgcgccgcatcaatgcctacttcatccataatttcacgtaacgtaattgcattacctgtacgtttactcattttaacttcttcgccattttgcattaaacgaaccatttgcataatttgaatttctaaacgattgctatctacaccaaatgtttctaaacttgcttttaaacgattaatataaccatgatgatctgcacccattaaatcgattaaaatatcattgccacgattaattttattgtagtgatacgctgtatcaggtgtaaagtacgtatagttaccatcttttttgattagtactctatctttatcatccttaaagtctgacgtacgtaaccaagtggcaccatctgcttcatacgtatagcctaactcatgcattttttctaatgtattatcaatcgcaccattttcgtatagtgatgtttcactaaaccaattatcaaaatgaacattgaaatctgataaatcttttttcaatttatccatttcataatcaacacccagttgtctaaatgtttttaagcgttcttcatcagagtaatctttcatttccggatgttttttggctaagtctttaccaatttcgacaatgtctttaccattatagccatctgttggcatttcatggcttgtatcccctaatgcctcaaagaaacgtgtttcaattgaacgtgctaaatttgtaatttgattaccagcatcattaatataatattcacgtgttacatcgtaaccagctgcaattaaaatatttgctagtgaatcacctacagcagcatttcgagcatgtccaatatgtaagtcaccagttggatttgctgatacatattctaataatatttttttgttttttggttcttccgcataaccaaatttatcccctttttgaattgcttctgagatgacagctgttaaatattgattatctaaatagaagttgataaatcctggaccagcgatatctacttgttttacgtttgctttacttgtatctaaattgtctacaatagcttgagcaatatcgcgtggattacgtttagcaattttagttaagaccattgcaatattagtagaatagtctccatttttagtatctttagggatttcaactttaatttcaggaatatcttctgctagatttgcttttttaatacttgcttcaatttcttgtattaaagttttctttactttttcaataatattcattcgcctatctccttatacttaagttcatattgatatgagcccattttttcgtcattttgatgtaattcgtattgtatttttaattttccaccattttcatttacaaaatgtaaaatactcttagttcttactattaatggaatgcgtcctgctggtatagtgtaaagtgttgtagtgtccttaccttcaacgaagtgtaagttcatattgatatcacctttacgtatcaacttcacgccattgtcttcaattttaattgttacactaacaactgcactttcaatttgttcttgatatcgaatataatcggcatgtttttgttgccatgacccttgagaagaaaattcaaatgtttgtttttctccattttgttttaagacttgtttcgtttgaatgtgtatattcttatccaacgtctgactcaccttaatctttaaaatattacaccacattatagcataaatcctatagtgcttgaagttaacaaaattctatcaacattagttaaatagttatcataacaacgtcagtaaaacaaaagtcattttgcgttcattgtcccatttaagtcctttccccaacttacgttacccgttgactttctctttgaaagtctttgtgttggggccctgctacaattaaaaaatcttgatatcctgtgtttttaatttaattatctacttctatgtaatgaaaaagagtctaagacgcttatgttttaagtctcagactctatttttccaagctattatgttttgaatgtcaccattagtatcatggtattacttttttctttctaatatgtctgcttttgattcaagttcaacaatatcataatgatacttttctaaaagtgttctatatttatagaagaaaatgatgccgaaaccgattgatgatacaaataataagatatttttcatttgttgtcctctttactccataaattagatatgatcttttaaataattatatcattaaataacatttttatacatttcttaataactaaatgagattagctgtaccttatttcctaggaataaatacttttgcttcactatcttctggataataatacgcattagggatcgcttgcaatcaatgcattaaaaggcgatttgatataaacgcttttactgtctttagtatcttcataagttgaattatcctgtgtttaagacaaaggctcggctcttgcacgcttggcctcttcgagtacaccttcaatgtgatctaccattaataatatatgattaaagtctaaatcgtcgaatttaagcagaaattttaatatgaagatttaagagttattagtaaacaaactgaacaatcttttcaacagatttatcatcatgtaatgaaatcagtttatcagttttataatgttggagatactttagaaaaataaaaactcgagatactcagtcattgaatatgcactgctgagtgtctcgagttttttctaatcaaatgccttaaataatgcctcgtttgagttattccacattgtttcattatgggatattaaaaattcttttaatatttttttattttcttcaccaatttgttcaataataaattgatgtttcatagacttatccatcatattgacatgttctggcatactcttataacctcgacgaatacttttatttacaagtaaataacatgcagtgacgcccgcgtaataaggaccattttcaccacgttcagtagtcacccaacataaccaatattccttagcttctggaccttccactgattctttatcagtaatccactttacgcctttttctacttccgcacgtgcatgcataccgccaatatcaacaaatgcttctttatttgcaacatcgataaatacaggtgcaatattatctaaactaatcgctcctatatttgtacctttatgaccatctagaggatcattttttataatattaaatttaaaccctttattttctgccacgatgattcctccaatacttctttaccttttcacactcgctattaaataatagcgtatattatcatcaaatatttaatttaattcattcaataaattaataattgaacctttcacttccgaatctttaatattaagaatcatttctttaggatagtatagtttatagtcttctcgattaatcccagtaatacttgaaatgactaacgattggctactaatttctttaatactaccatttcgtcttaacaaatggataggttgtcgattagaaccaggtcgatcataatcatatggtaaatctgaaaatgcttcactaacaaaataatattccgggtcaatgccaccttcaataaataaatcctgtaattcagtaattgtaataatcgaaccatcaaatggaatatacttaaagagatcacgattaataaatcgacgcgctaaatcacttaagatctcatcttcttcatgtatccatttctttaaataaaataataccattacttcatctaattctacatactgatcaattgtaattgtaccttcaaaaaatggaataaattcttttggatacattttaaattgatagtcttccttataaagctgtttgactcgcttaagacaattatttaatagtacttctccaccacgacttacgggatgaaaatagatttgccaatacatttggtaacgactcataataaaattttctacagcatgcataccactttctttaataagtacttcatcttttgatggtctcattaatcgaagtatacgctccatatcaaatgtaccataagatacaccggtgaaataagcatcacgttgcaaatagtccatacgatcagcatcaatttgagatgaaatcatggaaatgactaatttatttttatgcgttttattaataacattggctacttcctgaggaaaggtctcagacactctacttaatacttcgttaacctcagtgtttccagtaataatttcttgggtaaacgcttcgtgatccgtattaaatatcttctcaaaactatgtgagaacggcccatgacccaaatcatgtaataaagctgcacataaagcaagggggcgatctttattattccatgcttcacgcccaacaaatgattcatcaatcatacgtcttacaatttcatagactcctaaagagtgtccaaaacgactgtgttctgcagtatgaaaggcaaggtataatgtacctaattgcttaatacgacgcaagcgctgaaattctttagttttaattaaatcccatatcagttgatctttaacatgaacatacttatgaattggatctttaaatactttttcttcagctaattttctagttacataagatgattgtgtcaaattcatcctcctctttcatacttgctttcatcagtagtaatatgaatttaagttaattaattcttataatactttcttcattaatgctaaatctaattgttcaccatacatttctggttgatatgaacgaattatttcgaaaccatgatgttgataataatgaatagcttctttgttcttattatcaacttctaaaaagaccgtatcatattcattttcaaattcttgtaatcctttttcaagtaaacttgttccataacctttatgttgtacacctggatgaacataatgggcagctaagtacaattctttaccatagataaagttagcaaatcctacaatttcattattttcttcaacaactaaaaaaagttgatcttctaatcgcttttttaaatggtgttcattatacgaagctgctaataattcattaattgttgatactgcataaatatttaaataggtattataccaagcttttgtagctacatctcttattgctataacgtcattagttgtcgcttttctaactgtatacatgcttcattctcctgacatttcattgtaatttaataacaaaattatatcatagtatattaataaacgctttcactcaactttaagatgcatcttattaagacagtactgcattccattcctgtgctctttctagagcatatacatctttcataacatctccaagtctttctgctgtaccaataatataaccatttagttttgctccgagaaaatccaaactatattctaattgtttaatgcaaggtttcgcttttactttcggacaatctcccccaactaagattaatctaaaatcaatgttagacattttagttttaaaattctgatatttaggatcgattaatgattctgaccaatgatcgataaatgcctttaaagatgctgacacactataccaatacacaggggatgcaaaaataactgtatcactttcaagcacttggtcaataatcaattgataatcgtctatgtatgactcaatttgctttgattcgtgtctataatctcttacaggtttaaaatgatattgtgttaaatcaatccaattatattgtttgccttctagagcatattgtgttaattgagcagtatttccttgtggacgacttccaccaaataatacagtaatcatatatcttacctcttttttagtttatattattaatgtattttttctatttacttattatgtaccccatctttttacttttatttataataaaaactcctacacctatataaacggtgtaggagtcattattacttttatttagcgtactttattcaactgggaataaagtatctattttcttaatttcttcttcagtcagttcaatatttgctgcttcaatgttttctacaacttgatcagcacgtttcgcaccaggaataacaacatcaagtgctggacgtgttaagtagaatgctaatacaatattagcaatacttgtattatgagtttcagcaatacttgataattcttttactcgacgtacgttatcattgaacacttctggttggaaatcacgacgcgttgcacgatgatcattgaatgtttgattttcttcatacttaccagctaaaataccagaagctaatggaaaatagggtacaaacgtaatatcattttcagctgcgtatttcattacttcttcattttcacgatgtagtaaattatattctaattgaacaacatccacatatccgtctttattcgcctctttaagttgatctaacgtaaagtttgaaacacctattgctttaatttttccttcttttttaagttcttgtaatgctgccacagcttcatcttttggtgtatcctcatcaggaaaatgaatgtaatacaagtcaatataatccacttgcaagcgttctaagctctcttcaacttgttgttttaaataatcaggttggttattttgaacaacatcgccattatctttaataacatgtgaacctttagttgcaatttgaactttttcacgaggatattcctttacaacttctcctacaagttcttctgagcgtttaggtccataaataaacgcagtatcaattaaagtaataccattatcaatagcttttctaacgacatctttcccttgctcttcatctaaattgggatataaattatgtcctccgactgcatttgcgcctaatgcaactggaaatacatgaacatcagattttcctaattgtacaaattctgccatgatattcacaactccttaaactatagtttctatttatagtttacccgattagtaatgataaattcattcaatagtgtttaaaacattaaatttgacatagtctttattttatatttaaatgtaactaataaagttacatttaggaggtgaatcatttgaatttagaatttaacattgccgttcacgtacttagttttttagtaaaacacgataaccaacaattcagtagtcaaactttagcaaaattaacctgcctcaatccagttcaattacgtagagtgactactgttttaaatcaatatcagtttattaagacttcccgtggtaaaaatggtggatatagtgcaaatcattcaactgctagcattaaactatcagtactatatcgtatatttgtgctcgaaaaagacagccaacagcgtattttcacaggtcatgagcagagcgattgtgaaatatcaagaaatatagcaaagaccatgtcacactataatcaaaaagaacatcatgttattttaaatttttatgataccctcacaattaatgatgtaattaatgatacacttcaggaggatacaacatatgacacattataatttaatcgttattggttttggtaaagccggaaaaacacttgccaaatatgcatcatcacaaggacaacaggttgctttaattgaacaatttaaagaaagctatggcggcacatgcataaaccatggctgtattccgtctaaagtgcttgttaatgatggtattaaacatgtcgatttttcaactgccttttcaagaaaaaaagaagtagtcaacgcattaaatcgaaaaaactatttaaacttagaaaatgatgaaaacattaccttgttaaactttaaagcacaatttaaatctaatacagaagtcgaattaattgatgaaaaaggtaagttagttcaaacactgaccgcagataaaattttaattaatacaggcgcaaaatctaatgttccaaatattgaaggtatagactcagcacaaaatgtatatgattcaaaaggtctattaaatatttcttatcaacctaaagaattagtgattattggtggaggatatattgcattagaatttgcctcaatgtttcaaagcttcggtacaaacgtaactgtattagaatataataaacaatttatggccagagaagatcaagaaatagtcatacacatgattaatgattttaaagataaaggcgtacgtttaatcactaatgttgaaacaaaagcattaaaaaatgaaggtgatttgacaacagttgaaacttcacaaggggactttactggtgatgcaatcttacttgctacaggacgtgtaccaaatacagatttagctttagaccatacagatattgagttaggcactcacggagaaataaaagtaaacaaccatctacaaacctctgtatcacatatttatgctgctggagatgtaaaaggtggattacaattcacttatatttctttagatgactttagaattttgaaatctgaattattcggtgaccgttcacgacacactgaaaatcgtggtactatcccttatacagtatttatcgatccaccgctttctcgtgttggtatgaccgctttagaagcacaaaaattaaattataattacgttgaaaacactttatttattaatactttaccaaaacacaaaattaataacgatggtcgcggtcttttcaaagttgtaatcaataaagataataatgaaatattaggtgctactttatatggtaaaggttctgaagaaattattaatttaattaaacttgctatcgaccaacatattccttatcaagtattacgtgataatatttatactcatccaacaatagctgaatcatttaatgacttatttaatatttaataaagaagctcgtaaacccattttttaatgagtttacgagcttctttatcatcgatatagattatttacttgctttacgctttgctaatttttcttttaattttctatcttgttcttctttacgacgcttacgttcttcattacgttttctcaaacgttcttcttcttcaggatcacgtggtttttttaattgtgcagtgactttttccataagttcatcttcagtcaatgcagcaagtgggcgattattaacaaaagcaaatgtcttacggcgaccaggaccacagtatgactgacagcctatttcaatttcagcatcaggatctaatttttctaattttttctttaatgattttaagttaactgcctgacattcgtcacaaatcaaaaatttattcttcacttcgctacccacctttatattattttcactcatatttacttccattcatttattacaactctaattattttactctttttaattaaaaattcaagcactaaaaaagatttgctataaataaaaagcaagacatatatttcttaataaaatgtctcgcttcatcataatagtagtcttattgtccgtgatatattttaaatttcaaaggtttaatgccttctttttcccatacttcataaatagagggcttatcaactctattatctataattgtaatgccacaatctcctccaccagcgccagaagtttttgctgcaccgccaaaacgttcaccaatatcacataataattttaatttttttgtttcaatatcaaccgtcgcttctttatccatttgctgaattatactacgattttgacgaatcattttttgtacaccttttatattattcgttttaaaagcatagattaaattttcaacacatgtatttgattgatcaagaaactcaccataaaaaatagggtcagattttaaacgcttgacttcgcttactaagtgaggcgacgaagcaggagaaccggtccatcctatgaggacttccatattttcaggcgcttgtaaaggttctatatgaagaccaggccagtttttttctaatacttcttctacagaggtttctttcatttgttgctttacccattcgtgatcaaacgtactataggcaagccatccactataaacactaacagcaatatctccgcatgaacttaaactttgtaatctcatatttgaaataaccgcaagcttatatatataaagatttgataactccatttcataaaattcatttagaaccttaatcacagatactaaaactgcagcactagaacctaaaccatacttttgtcctgatgcatctgcaagattactatcaatagtaagatggaaatgttttaattttatattacaacttttcgcatactgctcaaatacttcaatagcagtcactacatatttgagttgattggctgcatgtacatctgatatttctattttatcttcattacgattaaatgtgacaggttcatagtgtaatgttttagaatgaatcgtacctgtgatttcatttgaagcttcaatagcagctgtgacaaaacgatctactgcaattaacactgatttatatcccggctcggttacagcatattcgcccgctatatacagttttcctggcgcttttgcctgaatcattatatctcttccctacttaattatttcgactcctgcgtgtgtaatatcacttgttataatttgatctttattaaatacttttaaaaattgattcacaatcgcttgttgatgtttcttttctattagaacttttacatttggtcctgcatccatagtaaaataacaaggtaatcctacttctctacattcatgtacaattctcatggcttcgtagctttccggcacaagatatgtaaatggtggctgtgcacctaaatttgttgcgtgcattctcaaaccgtttgcctcaatcacttcacccattcgtttaaaatctttttgggcaatcgcttgttttgtgacttttaaatcttcctctacatgatctaaccagtattgataaaaacgtgaggtatcacgagttaaagacatacctgaacgacttgatactttctttgatttattgttaataactacaaaaatcatagctaagtcattctcgaagccatctgactcaatttgatgggcgtaagacgttttatcatcataacctttttcccattcagcaaaaccaccataaatacttcttgatgctgatccagaaccacgacgagcaaggcgagataaatctttatctgataggtttaaatcaagcgcttcattgcaagcaccagctaaagctgcatatgcactagctgaagaagctaaaccggcagcagtaggcacaaaattatcactttctattagtgcatacgttgaaataccagcttcttttcgaatcatatccatataacgttgaattttagcactttctttagcattaacagcttctttatttaaaataagttgatcttctgttaatgagtcatcaaacgttacacgtgtttctgtatagaaacgctctaatgtcactgataaactattattcataggaataattagattttcatctgcttttccccaatattttattagagcaatattcgtatgggcgcgtgctttaccactttttttcaaagatttatcctcctaacttttcaatccaagtatgttgcgctccagctttttcggctgctgcaacaatatttttagcagtcacttcttctttagttagaattaacatgctacctcctcgtccaccaccagttaatttaccagctactgcaccatgttgtcttccaatttcgagtaatgtttcgattttatcgtgactaactgttaatgttcttaaatcgtcttgacattgattaaatatattagcaagctgatcaaagctatgatggttaattgcatcactagctaaataaacaagagagccaatatgttcaatgacattcatatatgactcatcgttatcacataaacgatgtacatcttcaactgcttgttttgtagagcctttaactcctgtatcaataacaaccatatagccatctaaatcaagggactttaaaatttcaacttctcctttttgataccaaacgggttgattcgttacaatcgtttttgtatcaataccacttggtttaccatgagcaatgcgttcagcccagtctgcattttctagtaattctttatcagatagcggtaattctaaataatcataacttgctcttataaaagctactgctactgctgcacttgaacctaaacctcgagaaggtggtaaattagcttgaattttaatcaacaatggctcttcaacatgattgttttctacaaaatgtgtaataagtgattttaaatgatcaggtgcatcgtataaaggaccatcataaacatcactctgaattgctgaataattacctttttctaagctttcaataagcacttttacttttcctgaagtaaatggaatggcgattgctggctggccaaaagttacagcatgctcaccaatcaatataatttttccgttagattccccatagccacgtcgtaccatgatatctcacctttaatattctttctaaaatgatttcaacattcattaatgttattttaaaattgaacgtatttgtacatgtcatgtcacacatatgtttatactcatttacttcaaatcttgcatttgtgttaatacatcaataaatagtataaaactttgtcaaaaatagttcaaaactttgaaatatttatatcctaaaaaatgttataatcaacataattatggttaaattatcgttcttaaatgaatccacctcatctatattactataaaaaataataagaatgtagcaatttttatatttttgaaggtaaatatatactttagttgtatgattgcatgctaaaaagggagtaagctaaaattcacttagaatttttcttactcccttttatcttattttaatctaaggaacgattcattttctcattacgttcaatcattttatcgaaatatccttcataacgttgccactcatcctctgtaattggattcatatttagctggccacctaagtctttaatcgcataaagtaattggaacatcacatcttgaactttaatgtcccgatgaagtaatgtttccaaagatgccatacattctggtttaatatccggatatttaaatttcgtaacttcacctttcaaggcacgttgataaaattcatgcatcatttcagctctttcttcaccagagccttcaacacataaataaatttgaactgcaatacctccacgtacccgtcgttgtgaaataccagcaaatttttttccatcaatacttaaatcaaatcttccaggacaatatgaatgctctatttctttagtatctatatctacattttcattttcgaacattttacaaataagtaaatacatcactgtgaatgcttcatcaatggttgtctcagtttgtcctttaaaaataagcgaaatatttaaaacaccttggtctaatacaaccccaagaccaccagaatttctaacgattgcattataaccgatctcgtcagttaagtattgaataccgtcttttaaaaatggtaaacgtgaatcatgtatacctaaaatgacagtgtgttggtgaatccatgttcttacaacgttacaagatatatcttttcctacactttctgaaaacgtgtcatcaaatgcaaatgactgcattggcgctaaacctgaagaatggtctatatagcgccaatgaatgtcattaaaatacttacttgctaaatccattattgtaatgtttgagcagcagtaataattgataagttataaacgtcttcagtagagcaaccacgagataaatcatttacaggtgaattaagaccttgtaaaactggaccaatcgcttcaaatccacctaaacgttgtgcaattttgtatccaatattacctgcttctaaacttgggaatacaaatacatttgcgtcaccttgaatttttgctccaggtgcttttttctctgcaactgcaggtacaatcgcagcatcaaattgaaattctccatcaaccactacattatctaaaccttcagattccactttttcttgtgctaattttactgcgttagcgactttttctacatcatctgatttagctgaacctttagttgagaaacttaacatagcaacacgtgggtccataccaaagctttttgctgattttgcactttctacggcaatttctgctaaatcagaagattctaatgttggattgatagcacaatcaccaaatatatattgtttatcttctttaatcataaagaagataccagatgttctagatacgccaggttttgttttaataatttgtaaggcaggacggacagtatctccagttgaatgtgcagcaccacttactaatccatcagcatgaccagcgtatactaacattgttccaaaatagttaacattgtttaataattcttgagcttgttcttcagtagctttacctttacgacgttctacgaaagatttgactaattcaggtttcaaatcacttttagaaggatcgataatttgaatattagagatatctaatcctttatcttgagctaaagtatttactttttcttcattacctaatactaaaggtgtaacatagtcagttgcttgtaactttgtagccgctgttaatactcgttcatcttcaccttccggtaatacaattctaacgttttttcctgaaagtttttcttgtaatacatctaataaactagacataatgccctcctcaaatttttaaaataatagtatgttcaccttaattatactttatttcttttaatatttctatttcattaatttgtaaacttttaagtatgtgtgacaattctctttatgataaaatttaatttgtattgatagaaaatatagttaaaggagcgatagatatgagtgaagcagctgaaacattagatggttggtatagccttcatttattttacgctgtcgattgggcaacttttagattggtgccagaagatgagcgcgaagcaatgattaatgaatttaaagtatttatcgaaaataaagccactgccagagaaaaacaagctggagattatgctttatataatattacaggtcaaaaagcagatattttattatggtatttacgtccagaaatgaaagaattgaatgaaattgaaaatgaattaaataaattaagaattgctgatttcttcattcaaacttattcatatgtatctgtgattgagttgggtaactatttagctggtaaatcagacgaagatccttatgaaaatccacatattaaagcaagattatatccagaattgcctagaacagaatatatttgtttctatccaatggataaacgtcgtaatgaaacatataactggtatatgttaccaatggaagaccgtaaaaaattaatgtataaccatggtatgattggacgcaaattcgctggtaaaattaaacaatttattactggttcagtaggttttgatgattttgaatggggcgtcacattattctcagatgatgttctacaattcaaaaaaattgtttatgaaatgcgttttgatgaaacgactgctcgctatggcgactttggtagtttctatatcggccatattttaactactgatcatttcgatcaattttttgcaatttaatatataaatggagcaaagactagcatagtaaacgccagtctttgctccatttttcaataaattaatatatttatataagacaattagtttccgagataaagtacactttttacaaagtgtacttcaagtagtgtggtttgggagaacttcattactactctgaacattaacaaatcacaaaagtgctgtcgctacccagcacaattttgatttgttaactattattatttaaccgaattgtaatgttctgaaacattattgttataaatcaattgtttttaacattaaattttattttcattaaaatatatttacctactattgagatataaatgaatggtcatcatattatgattgttaagttttataatgtaaggtagttattttcatgtacttctactataataatgattacatcttaatgaatggtgatgaaatggaaaatacaaataagcaagaacatatagatgaaactttaatcaaagacgtcgtcatgatggctggacgtatattacttgaatctggtgcggaaggaacacgtgtagaagataccatgacacgtattgcccgaaaactaggatatcctgaaagcaatagcttcgttacaaatacagtcattcaatttactttacataacgaatcttacccccgaatatttagaattaattcccgtgatactaatctcattaaaatttcacaagcaaatgaaatatcacgattaatcacaaaaggggatatctctttagaagatgcaaaagagcgattagaaaaaatatatattgcaaaacgagatagtagcttaacatttaaagggattgctgctgccattattgcaattagtttcctatatttgcaaggtggccaatttatcgatgtgattactgctctacttgcaggtagtattgggtatctggttgttgaaattctggatcgccgattacacgcacaatttattccagaattcgtcggttccttagttattggtattatcgcagtattcggtcattggttagcgccaagtggtgatttagcaactattattattgctgcagtcatgccaattgtacccggagtactgattacgaatgctatacaagatttatttggcggtcatatgatgatgtttaccactaagtctttagaagcacttgtaaccgcatttggtattggtgccggcgtaggttcgatattaatattagtttaggagtacgcataaatgttttggttatttaattttatatttagttatacagcttctctctttttctgtgtcatctttgacgctcctagaaagctgtatctatcgtgtggttttgttggagcttgtggatggatggtatatattttattctaccaaggtttgaatatacatacgatttattcaagtttcttcggtagctttacattgggtttaatcagtcattacatggctcgtaaaaaacgtgaacctgcaatcattttcatggttactggtattattccattagttcctggtggacttgcctttgatgcaactaaaaatctagtattattacaatttggtaaagcaatcaatacaatgctcgaagtcacacttatcgctggtgcgattgcattaggattattattcgcagaccaaatttcaaaaatcatcgtttctggtttcgctcgacgacgtaaacgtatataaaaataaaacgcgagagattgttggtaattcaccctcatctctcgcgtttacgtatattattttttatcttttatcatttctttaacttctcgttctgattgatttaaaatcagacgacttaattcgtcattattcatattttttaatttagggtatcgaactacaaagaaaatgagacccatcactaaccaactacccaatgcaatatatgaaggcattgaaagtgaagccggtgatcctggaactaataataaaagtaaaaagataaatgaaacaatagaacctaaaatagcaaaggtcttataaataggaccatacgtattactttgtttattgtaactaaatagcttagcagcagataaacaagtaataaaataagcaatcgatacacctgttgaagacatatcaacaatccatgtcaatgcggtacgtcctaaccatggcgcaattaaagtaatagctactaaaaagataatggctacatagggtgttttatattttggatgtaatttgctaaacgctttaggcatgataccagcacgtcccattgagaatagtaatcgacttgaactcattaagaatccatttaatccagtaaaaatccccataataatagcaatcgctaatattcctaagccaatataaccaaaagcagtttgtgtttcagcgcctgttaaccataaatttccattaaagttcgcattattcgtacccaaccatcctgtgtataaaatcataatgacataagttaaagctgccgctaataaactgtatacaatcaatttgaacgttttgtttggcgaaaaattaaactcttctgctgtttgtggaatattatcaaatcccacataagcccatggtgcaatagctacaatcataataatggaattaaaccatccaagctctttacttgctaaaggttgtaagttgcttaacgaaaagttatttccgaaaaatgaacctacaaacataagtacaacaacaatgaccattgctacacaaaagtaatattggagtgtaccagaaacacttgcaccacgaattgcaataaacataaatactagtaataataccgtagcaataactatttctgttatgtaaacatcccatccagcaatcgtatataatcttccattattcaaaatgtttggcagtaaaaacttaattaataaactaaacgctgtcgcatttaacgctactacacaaacataaccgaatgttaagaaccatgatgaaaagaaactcacatatcttccaaaacttaaataactaaacgcgaatgcgccgcctgacacaggaaaacgttcgactaatgcgccataacttacagcaattaatatcatcaataaagcaccaatgacaataccaatagatgaagcaatcggacctgattgtttaatccaatcaccgggcagtatgaatgctccccatccgatacacgagccataagcaatcgcccaaacaaatttttcagagaggttttgttttaaatctcctctatctatctctcgatttttatcattcataaataaactcacctcaggtacttaacatacccaaaaaagtgagtttactaaccaaaatataaaatattattatccagcaaatttaaatgttgcaataattagcattaaccatcccacaataaagagtacgcccccgattggtgtaatcgctcctaaaatacgaatttgagtcaatgcaagaatatataatgagccactaaatagcacaataccaaagaacagaagccatcctgcccaattcacattaatagaagttgtaccactaatgatgccaatcataattaatcctagaccatgatacatttgataattcactgctttttcccatactgacatatatttatcagagagttttccttcaagtccatgtgcaccaaaagcgcccgtaccaacagacatcatcgtacacaatgcacctaaaattataaatattttcatcataatgttttagttctcctaacttagttttaattaaaaatcaaatattgattcaccgtttccaatttcatcatccgtcaccatcatattagacgatttattttgatgcttcattgtttgtggaactttaccacccatcgcttcaatttctgcagcagtaatcgctgaatgatttgaaggcttatttgaaaacgaagattcagaagttacaatattagtaaaatcatgttttgattttttagaaggtcgttttgaaacatcggaataaagagatgttaaagtatgaatcgcatacatatgcttttcaaactgttgttcatcttgagcttcatctgcctgcactaattcgtgttctataagttgaattaattgttctttgttcaattaagattccccactttcgcaccattgtattggtgttttaccttttgattctaaataatcatttgtacgagagtaaggtttagacccaaagaagcctcgataagcagataatggacttggatgaacagatttaataatatgatgctttgctgtatcaattaattttatcttttgctgcgcaggttttccccataagataaagacaacatcttcgcgataatctgaaatagccttaataatttcatctgtaaagatttcccatccaatgttcttatgggaatgcgcttcacctttacgtacagttaatacagtatttaataacagaacaccttcacgcgcccagtcttgtagatgtggagaagttctatgacagccaatatcatcttctaattcttgatacatatttcttaaagatggtggaaatttagcattgggttgaactgaaaatgctaacccatgtgcttggttaggtccatgatatggatcttgacccaaaataacaactttaatatcttcaaatggtgttaaatcaaaagcttgataaatattttctctatctggatagacgatttgtgtcgtatattctttttctaaaaaatcatgcattgctttaaaatcatgttttgttgtaatgtcatgaaaaatgtctgaccattccatcgttttcacctcacttctattttaacataggacccctctgaaacgtgatataaatcgccttactatcttcatgctagaacaatagttgagttacatgatatgataaataaagatgtaaataattgacaggagtgataatacatggcattaaaaaaagtattaacaattgccggttctgatacaagcgctggcgcaggtatgcaagccgaccttaaaacatttcaagaactaaacacttacggtatggtggctttaacagctgttgtaacaatggataaagaaacttggtcccacgatgtgacaccacttccaatggatgtattcgaaaaacaattagaaaccgtcatttcaattggtccagatgctgttaaaacaggtatgcttggaactgaagaaatcattaaacgtgctggcgaagcatttgaacaatcagatgcaaaatatttcgtagtagacccagttatggtatgtaaaggggaagacgaagtacttaacccaggaaatacagatgcaatgattaaatatttattacctaaagcaacagtcgtcacacctaatttatttgaagctggtcaattatctggattaggtaaattaacgtcaattgaagatatgaaaaaagctgcaaaaatcatttatgatcaaggtgctcaacatattattattaaaggtggtaaagcattagatcaagataaatcttatgacttgtattatgatggtcaaacatattatcaattaacaactgatatgttccaacaaagttataatcacggtgcaggttgtacatttgcagcagctacaacagcttacttggcaaatggtaaatcacctaaagaagctgttattagcgctaaagcatttgtagcatcagcaattaaaaatggttggaaaatgaacgactttgtaggcccagttgatcacggcgcatacaaccgcgtagaacacatcgacgtcgacgtcaaagaagtttaaagaagtactgtatttttgaaaaaaatgctagtacttcttatgcaaaagacactagtcttttgtaatccttaattagatttcattgtccttccccgacaaaagcgattagagttgaaagaagctaatcagcgcactttcaattcaatcagctactgtctgtactgtatttttgaaaaaaatgctagtacttcttatgcaaaagacactagtcttttgtaatccttaattagatttcattgtccttccccgacaccccaactcgcgttgatcgttgactttcattttgaaagtctctttgttggtgtcccagcattagagttgaaagaagctaatcagcgtactttcaattcaatcagctactgtctgtactgcattttaaaaaaaatataagcacttctaaagcttttaatcttgtgtatgatagtttggtcacactaggattaaaagcttttcttatatcttcattatcttctaggtatttagtcgtagtatgctctacacagttcgttgcagtaaaagttagtaccatagactcatgttttttatcataaaatccattactatattaagtgtagagagacaaaggaggaattaacaacatgattatctacaagcaaaatatagaaaacggtatcccaatatacgaaatcattacaaagaccttcaagacgattacggtaaaattcgatgaaacgtttagtaaaaatgacatctatcaattgctctctctactagaaagtgacgttgataacatgaaattaagttattcatcacatttcaaaaattaaaaagtgtttttcgtaattgaatacgaaaacagacgaatatttcaaaatctttttttaaagttaagacgcccctaatactcaaaactttaaaaagtcattaattattcaaaagctcaccctaataaaatagcgttaatgttagtccaaaatgtccccttttggaaacttagagagaaactttaagttatactaacattaacgctatatttttataatattgtttcttttttaacacctatggtaggttatcaacggttaaataaataattataaatcagtatgattactttttttagtaataactattttttcttcaccatttaaaccaaagacgtttatttcattatgattcactttttttaagataacttcttcgtctatatctataatctttctatacttaacgttaaattgtgtccactctatttgaaaatacgctaatacacaatctactaccagttgaccaggaacaatggttgaatgaagctcatttttatcattaacaaggcgaaggtaatgactcactttatcatgactaaacctcatcatttacctccttttttataaatgtttgcctaataaatatacattgtctattatctttatatatttttaaatcgtagatatattggatatatgttttaaactttttcgtacttttatgtgttaagtacgcctcatattttagcctacattttaatgattcaaattcttcacatgttgttcgcacaagaagaatattttcttgttgaaacttttggaacaacttaaattttggccaaacgtttgcacacatgagtggaggcaccacgcctttatacgttctttcaactacttcgcaatactctcttacttcttgttcattaaaatatatttctattttctcacaagccccatcgttcgaagagtatcgcattccccattcctcctccaatccccatcgtagcaactccccgcttccaatgtgtcatatttaataacctagtgattaacgctacgccacttgcgctataaggatgaccagacgcaatggctccaccccactgattgacttgattaatatttaattttaactcttgaattgaagctaaaacttgtgaactaaatgcctcattaagttctattgtatcaatgtcacttatttttaaattttgttttttaagtaattttgttacggcaggtactggtccaatacctagtcgtttcggattgacgcctattgttacagcatctgtaaacatcatcccctctgatatgccgtattgtaatgccgtttcttgattcataacgagtgcaagcgcagcgccgtcatttttcatacaactatttccaaccgttactgttccgttagcaagtaaaggacgtaatcgatttaatcgttgttcagtaagtgttggcttaatactttcatctttatcaaatagatgacctttgatgtttaaagatacaatttcattacttatacttccattctcataatattgatgcgtgagatgatgactacgtatcgcaaaagcatcttgttgtttacgcgtaatatgaaaatattgcgcaacattttcagccgcctctatcatacttggatcttgaccttttggtgcaaaagaagcacgctcataaaattctggtaattgggtatcatacactgattgaggccgtttaatcttccaaggagcacgactcgtgctttctactcctccagctatataaatatgacctgcacccgcttgaaccattcgacatgcatatataatactttctaaccctgatccacattgacggtccattgtaacacctggaatactctcagctagacctgcttctaataaggctttacgggcaatatttccaccattacctacgatatttccaatcactacatcatcgatatcaggtattattttaggaaaagttgaattcatttcttcaaataagggcatgagtaatgtttcaggttctaaatgtttcaatttcccaccatatttgccaaaaggtgtacgcttcgcccatataatgaccggttggttcataatttaaagtctccttttacataggcagtacgcattttatttcgagcaactttgccactttgggtatattgcatcctgtctacttttataaatttggaaggtacatcatatcgcgatagaactttcataatatattgtcgcacagtttggtactcaagttctatcgatcctgtatatagtaaaactgctatttcaccaaaacgtggatgcggttctcctataatcaacgcttcttctacgccatcaatattttttatcatttgttcaataacttgaggataaacatttttacctccaataattaatcgttcattttgacgactcactaaatataattgattatctttaatataagcgtaatcgcctgttttaatccatgtttcaggtaatacgacagattgatttacatacccagagaatatcatattactttttacatttaatagccctatatgattcttgtctttttcctctaaaccaatcgttacattttgaaatatgtatcccactgaatcaacagaagctttacggttaatgttataactaataaaacttgcttctgacgttccaaaaaattcaataatattagcatgctgaaatgtttcggctatacgcttaaacaacgaagaagagagtttcgccccactacttaaaatagtcgttaaatgtaggtgatcgtgatttatttttgttattgcatgtagcattgttggaacaagaaataatgcactatttgttgtttgttgtttcattttgctaatgagcttagtcgcattaaaacgggtttgtccaataaatgttctccctgtatataacgcataaatacaagtgtataaagacaatgaatgtgcaagtggtcccggtgctacaagtatgttttctttatgacgaagtagcttttcattttctttgtatgacgcaagccaagatggttcatttcgataatatgctttaggtaaccctgttgtcccagatgtaaaaccaatatgtagtagttgatggacttgtgactgctcatttaaatgtgttggatatgtttcagaagactttgtctttatcagtctatgctgttcatcaacaagatagtcaatatgatacgtttcaatcagttgatgaattgttacttcagaccattgatcatctagaaaacaaggaatacttccttgttctaatattgcaaaataattcaacatattatgtaaaggacttttacttaacaatcctactcgggaccctttcgataaatgcatgaagactgattttaattgctgtattgctgtataaagttgttgataggttaatatactttcttcaaacgatagcgcaatcgtatccggttgttctattgaatagtgatttaatttatttagtatttctaacatatgaccctctctgaatgttaactagattaattattatattaacattatatgaaaaataacacataaaaaaatcactcaaatatattcatctgaacgataatatatttgagtgatggtttttattctaaattagcatgattgtcttgcattgcttcttcattaatattaaaggcatccattaatccaatcacgacactatctaaaaagataagtgaagattgttcaaatagactacctaacggctgttcagagccttctgcttcatgtttcgttcctgcaggtaaagtaatcactgtatcagcgacatcgccaattttagattcttttttagttgttattaaagcaattttagcaccaactgaatgtgctttttcagctaataatcttaggtgctctgttgatccagaaccggaaataataattaataaatcatgctctttaatagatggcgttgttgcttcacctattgcagatgcatcttttcctagttgattcaaacgcattgcaaagctattagcaacatatccagagcgacctttaccagctgtaaagatacgagatgcgccaaccacttcatttgcaaaacgtccataatcattatcctctagatgtgataacgtgttatctatttcttcaagaattaaatgataattgttaaaagttggcattttatttaccttcaatcgcttcacgacattgtttagctgcttctacaggatcatctgcgttagcaataccgccaccaacaataaccaagtcaggttcttctgctacaatttctttaattgtttcaggtttaataccgccagctacggctactttagaatttttaatgactgatttaactgtacgtaagctttctaatggagattgtccttcagcttgtaaatcataaccagtatgaacagcgatataatcagcgcccatttcatctaattctttcgcacgtttttctaaatcttgtacagcaatcatatcaactaacaattgtttaccatgtttgtgtgcttcttcaacagcacctttaattgaagcatcttctgcaacacctaagatagtcacaacatctgcaccaaatttaatagcttggcttacttcatagtctgctgcatccataatttttaaatcagctaacactttagcattattaatattttcgtttaaatgttgaacagctggtaatccttcattaataacgataggtgtaccaatttctacgatatccacatattcttcaacttttttagctaattttgctgcttcttctttatttaataaatcgattgctaattgtaattccattacaaacatcctttcatatcatagtcgtagtagtatacatacccatgttaaatatttttaaacctttaaatcacttcaaattattttctttcatttataaataaattgagcataggtgtacaattcagtcgttctttttagtaaaatagatagatacacacattgtatggttgtaaggagtgaacgtgttggaacccattaaagctgaagaagtacaacgattgttaactacatttgaaaacaaacctgtctatttgcatgttgaaacgacgaatggtgcatatgctaaccattttgatcaacgtgtgtttaatgcaggtacgtttttgcgaaatatacaagtcacatatgaacatgcgcaactaaagggcggagataaagacccatttcgtgttggattgaaacttcgtgatggaggttgggtatatgtgcaaggcctgactcactatgaaatcaatgataataatgaatttttaatagctggatttaattacgaaggacaattggctgcaacgattgaaatcagtgaacagccattcacagtatagaggaggaagattcatgaaagatgaaagacatatactaatgatatttccacatcccgatgatgaaaccttctcatctgctgggacgatcgcaaattatattgaaaacggggtacctgtcacttatgcctgtctcacattaggacaaatgggacgtaatttaggcaatcccccttttgcgacaagagaatcactaccttatattcgcgaaaaagaattagaagatgctatgaaagtgattggtattactgatttacgtaaaatgggtttaagagataaaacagtagaatttgagccacatgagcaaatggatgatatggtaaaaacattgattgaggagacaaatccatcagtgattatttcattttatccaaaatttgctgtacatccagaccatgaagcaacagctgaagctgtcgtaagaacagtagaacgtatgcctaaagaagaacgtccaagacttcaactcgtggcatttagtaatgatgcaccggatattttaggagaacctgatatattaaatgacattagtcaatataaagagattaaattaaaggcgtttgaagctcataaatctcaaacaggtcctttcttaaaacaattagctagccctgaagttggtggagaaacacaaagttttctagaagtcgaaccttattggacgtatcatttcgataattaaaatcattagaggaggtacaataaacgaatgactgaatttgatttatctactcgagaaggtcgctggaaacattttggttcagtagaccctatcaaaggtacaaaacctacaactaaaaatgaaatgactgatttacaaagtacacataaaaacttcttatttgaaattgaagaagtgggtattaaaaatttagtatatcctgttaaaattgatcaatttcaaacagcaggtacatttagtttctcaacaagtttaaataaagatgaaaaaggtattaacatgagtcgtatcttagaaagtgttgagaaacattataataatggtttagaactggatttcgatacactatatcaagtattacgtacattacaagacaatatgaaacagaatgctgcgggagtagacgtttcaggtaaatggttctttgatcgttatagtcctgtaactcatatcaaagcagtgggtcatgctgatgttacttacggtttagcaattcataaagatcaagtaacgcgtaaagaacttaccctcacagctactgtaacgacactttgtccttgctctaaagaaattagcgaatactctgctcataatcaacgtggtgttgtaacagtaaaagtgtatttagataaaaattctgaaaggatagatgattacaaagaaaagattttagatgccatggaagcaaatgcaagctctattctttatccaattttaaaacgtcctgatgaaaaacgcgtaacagaacgtgcatatgaaaatccacgtttcgttgaagatttaattcgtttaattgctgcagatttagtagattttgactggattgatggctttgacattgaatgtcgaaacgaagaatccattcaccaacatgatgctttcgcaagactaaaatatagaaaataaataatcctccctatattgagtgaataaatatagggaggattatttattttttaaatatttttttgaattctgatggagacattgcacctgcgtgtttgtgttggtatattaaacgatttttaaatttctctttattattataaatttcttttaaaatacttgaaaattctttttcattattagaagtaattatattattaggtgccgttacatctgcgttatgtgtaatttctttttccgctagtattagtaagttataatcgaaagctgctctcactgaatccaatatttctttacctttattgatatctatatatatatcacattcttcatataactctataactttcttttttatcacattaggatataaatgaatattagaatatttattaagtgttaataatttattagacatagtagttaaagctgcaatatgaaaatcatactgtggattagattgtgcaagttgctctagatattgagtatcttttttcattaggaactattacttttaaatctctattaggtcgatttaaattgtgcattatatgtcgaataatattatcgtctatttcaccctgccaatataaataatcttttccattattaccagtcttattaattatagaaggtactcttaataaagaattaaatagaaaattgctagtttcaaaattcccttctttcaggaaaaattcataaaaatctattgatgaatcaaaaaaatattctttatttttccatcttaataaaatattatgcgttacaaaattttctatcaaaaatttttcgtttttttcattataataacattttaatagtcttttatgactactcggttgaattactaatctagcgcatctaaatccacacttatattaaaaatactaactcttctcacacaaattacttatccaaaatcaaaaataaaaaaatagccctcccaaatagtgggaagactattttcattgtagtagtaaactactttttatctgatctatttttacgacgttttcctgctaagaagagcgtaccagcagcagcaaataaagagccaagtaaagtgccattattttgttcattattacctgtttcaggtaatgctttagcttcactattattttgtttatgagtattatttgaagtattattatcttcatttaactctgatacgtcattgtttgaatctgtttgatcagtgttgttaacagacgcagtattatttgaatctgtagtagcgttattatcagttagactatctttatttccttcaactgaattattgctatctaaagagttattaccttcttcatcttttgaattatcttcatttgatgagcctttatctgctccgtcttctgagttatctccatctgatgaatcattgcctgctccatctcctgagttgtctccatttgatggattatcacaattttctcctacaacaacttttgttggggtagatactttaccatctttatctttttcaacaacagtaattacatcacctttatcaaggtctacgccgtctggaatatcaacagtccaattaccatcctcatcaatgttgccttctgaagtactaccatctgggaatgtaaccacaattgtgttgcctggtgtaccatctgttcccgtaacttcagtatcattatcatcaaccgggttaaccgttggcgctggaatatcaatcacatcacctactgtaatcgttgttgatgcttcttctgtagaaccatctggatacgttaccgtcactggtataactatagatgttcctggtactgcatcttccgaaggttttacagttaattcaccagtattatggtcaactgttacttcccatcctgatggaattttcgatttatcaatttcatattgagtgccatccggcattgtattatcaccagtttgtggcactttgactgtttctccaggatctactgttacattatcataacttggatcattagtattcgcttgtgtttcttctccgactgttacagggactttaacgtgatcttttgtgccatctggatacgttaccgtcacatctacttctgttgttcctggtgtattaccgtccggtaattggtttggatcatccactgtgatgactggttgttctttttcacttggataatctggaatcgttactgctccagttacatcttcttcagttgttggagtaccgtaatcttttgtaacttcatccgttgttggttggtaagcatcattatctgcttgttcatttgttgtcactggtactgtcacatgatcttctgtgccatctggatatgtcactgtcacaggtacatcgactgttcctggtgtattaccgtctggtaatgtacttggatcatcgactgtgattgttggtgtacctttttctgatggataatctggaattgttactgctccagttacatcttcttcagttgttggagtaccgtaatcttttgtaacttcatccgttgttggttggtaagcatcattatctgcttgttcatttgttgtcactggtactgtcacatgatcttctgtgccatctggatatgtcactgtcacaggtacatcgactgttcctggtgtattaccgtccggtaatgtacttggatcatctcttcagattaatatggatgatgtttatactattggcgatagaaaattgatttacctatgtttaataccctagataattcttctgataatttagtttttgttagagtttaacataactgatgattatcagaagttccgtcactataaaactaattattatccatttttatcctttctttaagattgagagatagtaaaaaagttaactacacttgtagctaactttttttgttcgaagaaaataaaaatgcacctaagaataataaaggaaaaataacgaataaacgagtaataaaaaagttggtaggtaaaaatatataaataataaaagacaatatgaaacaaagaaaatatattttttatttgtactcatgtcatcacacctccagtattattgtattataacttttttaattgttctttaagttgccaatctccgctattagttcagaacattatctaaagattgctaccaatccaaaaatataatactaatgtaggaagctaatagataaatgatgacttttatataccaacttattttattttttataattataggaacgtatgctttaatgcgtggagaatatatgggtattgaatggaattttttattatctatgtatggcatgttcgttggatacttggtaatgttctatttttcgatttatactaatactgactttagtagaagaacaataaaaataatatcaacaatcagtattattttaacatctattatcttagttattttgggatatttactgtttattttactaacagaataaatatacaaaagggcttttctagacatgaatatataatctactttttatttttatatagataattaccaataaattctactaaaaaatgaataattgtacctaaaataatagctgataaacaaagtaaggtaatactataattgtcgcttaatgaaaataaaaaatacaataaaatcaaaactccaactaatgttattttaaaagtttttttgaaagtctttttatctatttttgccatctccttttctaagtttaagttaacaataaataatatttattatcatttatgattatcaaaagttatgttaatggaataaattaataaacttttcattaatagaacaataatatagatgtcatacagctgagacgtttaatcgtctcagctttttgcataataaaagagcagttataattgattgttattatgacaaatgtaatagttaaagtcacacacagaatgtgcttaacacgtcatatcacatatttaaaaggaagtgagtgccgtaataaatatattcaaaataagttataactacagattatttcatttgtatatttatatcattttgtcgatcatttcataatgtataagatagatatattttgaagtaattaagtaaaaaataaacggaattttcaatttaatttaaaaaattaaaaaattccgtgaaatatatttcgttttttagtaaactgtctactaaggaagaaagtaagtagtgagatattgttcgatttgaagccatacctcacatctaaattaaatataaggggatgacagtagattatggatttattaattggtacgttgtttttagttttagtcttagtgatttttacgttatttacatataaagcacctagtggtatgcgtgcaatgggagctttagccaacgcagctattgcgacatttttagtagaagcttttaacaaatatgtaggtggagaagtatttggtattaaatttttagaacaactaggtgacgctgcgggaggtcttggtggtgtcgctgctgctgggttaactgccttagctattggtgtttcacctgtgtatgcattagttatcggagctgcttgtggtggcttagacttacttccaggcttctttgctggatatattgtaggttatcttatgaaatatacagaaaaatatgttccagatggtgtggatcttattggttcaatcgttcttcttgcaccacttgcacgtttaattgcgacgggtttaacgccagtagtgaataatacattactaaaaattggtgacattattaaaagtagtacggacacaaatccaattattatggggattattcttggaggtattattactgttgtaggtacagcaccgttaagttcaatggctttaaccgcattacttggtttaactggcgtgccaatggctattggtgctatggctgcatttagttcggcatttatgaatggtacgctgttccatcgtttaaaattaggcgatcgtaaatcaacaatttcggtaagtattgaaccgttatctcaagcagatattgtctctgccaatccgataccagtgtatgtgacaaacttctttggaggagctgctgcaggtttaattatcgctttatctggtatgatcaatgatgcgacaggtacagcaacaccacttgcaggattcttagtgatgtttggttttaatagtccaatgaaagtgattatctatggtgttgtaatggccattgtaggtggtttagcaggcttccttggttctcttgcattcaaaaaatatccaattgttacaaaacaagatatgatagatcgtgaagcaaaaagaaaagttaaaacagcataaatatgagtgacttctttgtcgaaatatggcaaagaagtttttttgttgtacgttttaaattttctatctcatattttttgtgtaataatataataaaaagttacacatattgtaacgttaatacacatgatgtgtattgaattttcaatactaaacctctgacaaaggagtgggctaagatgcaaaatttaagaaatagaaattttttaacattacttgatttttcaaaaaaagaaatggaattcttacttaatctctctgaagatttaaaacgtgcaaaatatgctggtattgaacaacaaaaacttaaaggtaaaactattgctttaattttcgaaaaaaattctacacgcacacgttgtgcatttgaaacagcagcttatgatcaaggtgctcatgtgacgtatcttgggccgacaggtacacaaatgggagtgaaagaaacggctaaagatacggctcgtgttttaggtggtatgtatgacggtatcgaatatcgcggattttctcaacgtactattgaagaaattgcagaatatgcgggtgtgccggtttggaatggtttaacgaatgaagatcatccaacacaagtgcttgctgattttttaactgcaaaagaagtattaaaaaaaccttatgaagacattcatttcacatatattggtgatggacgtaataatatggcaaatgcattgatgcaaggcgcagcgattatggggatgacttttcatcttgtttgtccgaaagagttaagacctaaagatgagttactagaaacatgccaatcattggctgataaaaatggtggtactattttagtgactgataatattgaccaaggggtgaaaggatcggatgtgattgctacagatgtgtgggtgtcgatgggtgagcccgatgatatttgggaagaacgtattaaattattagaaccttatcgtgtaacaaaagaattaataaaaaaaacaggcaatccacataccatttttgaacactgtttacctgctttccataatacagaaacagaaattggtaaacaaattaaagaaaaatatggtttgaatgaaatggaagtcacagatgaggttttcgaaagtgatcgttctgttgtctttcaagaagccgaaaacagagcacatacgattaaagcagtaatggtggcaactttaggcgaatagagaaaaagggggacctatggatgtctaaaatcgtggtcgcattaggtggtaatgctttaggagaatcaccgaaagaacaattagagcttgtaaaaggaacagctcaatcattagtcggtttaatcaacaaaggatatgaagtggtcattagtcatgggaatggaccacaagtgggaagtattaatttagggttaaattatgcagcggaacatgaacaaggcccgcctttcccattccctgaatgtggcgcaatgagtcaggcgtatattggctatcaaatgcaagaaagcttacttaacgaactccatactttaggtatcaataaagaagttgtaacactcgtgacacaagtcgaagtagcaaacgatgatccagcgtttcaacatccaacgaaacctattggcttattttatacaaaagaaaaagcagataaaatgaaacaagaaaaagaatatgcatttatggaggatgcaggacgtggatatcgtcgcgttgtgccttctcctcaacccattaatattgttgaacttgatagtattgaaacactcattaaacatggcacgcttgtcattgcagctggtggtggcggtatcccagttgttaaggaacaaagtggtcgttatcaaggggtcgatgcagtcattgataaagataagacaagtgcattacttgcagcgcatttacaattggatcaattaattattttaacagccgttgattatgtttatattaattacggaaaagacaatcaaaaaggactaggtgacgtcacagtcgatgatatgaaaggatatattgccgataatcaatttgcgaaaggcagtatgttgccaaaagtagaagcagctcttcaatttattgaaaagaatcccaaaggtagtgtgttgattacttctttatcaggtttagatcatgcattagaaggtaaaattggtacatgtattacaaaataaatagttatattaaatcgcttgagcctaatatatgtattttacatatgtaggctcaagtttttttttgagttattcaaatatctaatggttacaagttacacttcgggttgtctgaggttatattcatagaccatttcattttaaaacaccctttgatttaatcaaggaataatgtaaacttataattatataaagtttacaattatgagttttattagtgtattttaaaagataggagtgacaaacatcatgacattaaatctagcagaacgtgtattgaatggagaagcgttaactaaagaagagtgtctaagtctatttcaagacgagacgattgatacgtttgaattattaaatgaagcctatatagtaagaaagcattactatggtaaaaaagtaaaacttaatatgattctcaacgcgaaaagtggcatttgtccagaagattgtggttactgtgggcaatctgtcaaaatgaaagaaaaacagcgttatgctttggtagatcaagaacaaattaaagcaggggcacaagtcgcgacagaccataaaattgggacgtattgtattgtaatgagtggacgtggtccttcgaataaagaagtaaatcatatttgtgatacggtagaagatattaaagctattcatccacaacttaaaatttgtgcgtgtttaggtttggttgatgatgaacaagcaacacagttaaaagaagctggtgtcaatcggtataatcataatttaaatacaagtgaacgttatcacgaggaagttgtgacaacacatacatatgaagaccgtgtgaatacagttgagatgatgaaagcacatcacatttcaccttgttctggcgtgatttgtggaatgggagaaacagatgaagatattatcgatatggcatttgcgttgaaagagattgatgcagacagtattccagtaaatttcttacatccgattaaaggtaccaagtttggtgggttagacttattatctccaacaaagtgtttacgtatcttagctctgtttagactgattaatcccacaaaagaaattcgaattgcgggtggtcgtgaagtcaatttacgttcacttcaagcaactgcacttcaagcggctaactctatctttgtaggcgattacttagtgacaggcggacagcctaatgaacttgattaccaaatgattgaagatatgggatttgagatagatgggtaatgatatatagataaaagaaacgttctcactaacaaatagggagaacgtttttatttttgttattagagtttcatactacatagtaatgagtcaattaaatacatataaatttatgtttatgatttttccgaatgatcattatttagagttttactatccttttcgcgtttttcgagtggaatagagtaatctttatcatccttaacatatgacatttggaaatgttttgtatgttctcgtcgtaaggcacgcataattgaaatagtcatcaaaagtaaaatgattgaaaatggtaaaccagtaacgacagaagctgtttgtaagcttgttaatccccctgctatagtcattgctactgaaatagccccaataagtaaaccccaaatgactttgtgttttatttttggattttcactgcctccagtagccattccagcaacaatatgcgttgttgagtcagcacttgtgacaatgaataaaaagattaacaaaatggcaaggccacttgtaatatcagataatggaaattttgataataattcaaataaagcaaccgtataatctttatctacaagactagcaattttatcgccacccatagcaattttgacagccataccaccgaagccacaaatccaaacgaatgaaatgagtggaggtactataagcacacacataataaattctcgaatggtgcgaccgcgtgatacacgtgcaacgaaacctccaataaatggtgaccaagaaataacccatgcccaatagaagacagtccattgttgaatccaagcattgttatttgtatacggatcaatacgtaaactatattcgacaaagtgtcttatgtagtctccgatagcaagtgtgtaagattcaaagataaattttaaatccccgaagataagcatgaagacaagtaataaagcgcctaatataatattaaggttactcagccattttacgcctcgtcctagacctgtaataccagatccaatgaaaataatcatcattaatactgtaatcgaaattttagtgatattgttatttggtacatggaagacatgatttaacccaccactaatttgcataatacccagtccaattgatgttgctatccccattacggtagcaataattgctaagatatcaatgatatttcgaaaaggacgtttataggcttcaccgaagataggttccatagcagtagaaattaaaccatctcgttttttacggaattgaaagtatgcgacgataagcccagccattgcaaaaatagaccattgtgagattccccaatgaaaaaaggtataacccatagcaagacgtgcagattctggtgattgatttggcacttttcctgggaaaggagaatgaagatagtgtgtcagtggttctgcaactccccaaaagacaataccaacacctaagccagcagaaaataacatgccaatccatgacatgaaagaaaattcaggttcttcattatcgtctcctaatttgaaccgaccatatctagaagtagctaaagaaattagaaaaatatctaaaataaatataataagtaagaaaagccaaccaaaagtatttgaaataaaatcgtacatcgtttgagcgtgtgtaccaaatgtcttaggaaatataccagcaattgcagtgataataataataatagacactgaaatgatataaaccagtctgttatttcttttacgtttgtcattcatgaatcaattaagtcatccctttataaattagttgttttgattatacatataattatgagtattttcaaaattcattttaatcgtttataaattactttaaagaaagttaacattaaatttgaaaattttttccaaaagaagaaattgcctaatgatgacaatatgaaatgatataatatctttgaaatgataagaaattttatagaaaagaaggggtatcatgtctcaatatgtcattacaaatggaagaatttatacggaagcacaagttattgaaaaagggtatcttgtcgtagaaaatggcaaaattagtgatattcaaaaaggtgattataaaggtcatttaaatcaaatagatgtagcaggaaagcatgtgttaccaggttttatcgatattcatattcatggtggctatggagaagatgcgatggatgcatcgtatgacggcttaaatcatttagctaaacaattattgtctgaagggacaacaacatttttagcaacaacgatgacgcaatctgatgagaatattgaaaaagcattaaaaaatattgtcgcatgttatgaaaatcaaacgttaggtgaagcagctgaaatcagtggtgtacatttagaaggaccatttatttctgaacataaagtgggtgctcaaaatcctaaatatgtacaacgtcccactgttgacaaaattcgacattttcaagaggtagcgaaaggattaattaaaatcattacttttgcgccagaagtcgaaggcgctcatgacacgttaaatgaattgcgtgatgagattattttttcaatgggacatactgtcgccacatttgaagaagcaaatgaagcggtagaacgaggtgcgaaacatgtaacgcatctttacaacgctgcaacaccttttgagcatcgtaatccaggtgtatttggtgccgcttggaccaatcaaagtttaaacactgaaattattggtgatggtattcattcacatcctgctgctgtagatattgcatataagcaaaaaggacctactcacatgtatttaattacagatgccatgcgtgccaaaggtatgaaagatggtgagtatgatttaggtggacaaaatgtgattgttaaagggaaagaagcacgtttagaaaatggcgcacttgcaggcagtattttaaaaatgaatgaaggactgcataatttaattcaatttacgcatgatagtttagaccacttatggcgagtggcaagtttaaatcaagccattgcacttaatattgataagcaaaaaggaagcttaagcataggaaaagatgcagatatcgtaattgtagacgaccatatacaagtagatacaacgattaaatcaggtaccattcatcatttttaagactactcgcatggtgaaaaatgaataatttagtatctctttatctttttaggtttatatatatgaagtttagtgtatatacatagtaaatctacataatatatgaattcgaagtaaaggagggatagataatgcaaaatgatttgagatttccaagtgcaaaaaatttctttactactttagggtggttatcagtcattgctttattagcggttgtagtggtcaatgcgctttataatagttcttttaaaagttggtcagatatcagtgtgaaattcactcaaacggatttaattttcttgattactttcgcaattattgcgatagtttgtattattatttcattacttttaaaattatttaaacatccataggaagtaaagttaacatattaaaagggacagaactcgagcgttctgtcctttttagtggtttaaataattaaatatgacatcatcaatgataatgtctacattcggatgcgtttgtaaaatagaagcaggtaatgtttcagttttcggtccattcattaaacgctcaatagcttcttgtttacgttctccaaaagctaataaaatgatacgttttgcgcgcataatagattgtaatcccatagaaatggcttgttttggaacatcatcaatcgtatcaaaatgaatactatttgctttaatcgtagaatcagttaaatctacaactcgtgtttgactgtcaaaagatgtacctggttcgttgaaaccgatatgaccattttctccaatacctaataattgaatatcgggttgtcctatagaggatagacgctgttcataagcatgtgcttcgtcttcaagatcaggtgcgtctcctcttggaatgtagatatgatcttcattccattcgttatgattaaataacagctcatgcatatatgtgtagtagctttgagggtgtgatgaattaagacccacatactcatctaagttaaatgttttaatatcatttaaattcacacgatttgccgttaataattcagataattgtggatagatttctgtcatcgtattacctgtcgctaatccaagagtagctgtcggcgtactttgtactaactttaacaactcaactgccacataatcacttgcgatagatttgttttttaaattgatcaatttcatcatctaaacgcctccatatgtttatgaatgattttttactgcttcaacaaatcgttcggtaatttgtttaggtcgtgtaatcgcaccaccaactactgtacaatgaacaccaagttcgttcacttttttatacatgtcaggtgtgatgacattaccctctgcaatgacttttgtgtttacttgattaagtacttcttttaaaaattcaaaatcattttcatataatatatgaccctttgtataagatgtataccctcttagagtggttccaatatagtcaaaacctaattgatctgcataaatagcttcttcaatcgttgagatatcagccataatttcaatatcaggcgctttttctctaatatatttcacaagttcttcaagaggttcttttggacgtttttgtttagtagcatctaaagcaatgacttcacaaccgctttcaatgagttcatttacctcttttgaagttgcagttataaacacacttgagttagtgtaatctcgtttaacaattccgataactggtaaattgatctccttgcgaatagctacaatatcttctatagagttagcacgtatacctactgcaccgccttgataagcagctaaagccatttttgacataatgaacgaagaatgtaaaggttcttcaggtaaagcttgacaagaaacgattaatccttgtggtaacatatcattcactccgtaacatttatatttataaatagaatatatcgagtttgtggttatttatacaatactgttgaattgatttactcatatcataacattaagaaaattattatcaatttaaaattataaattgaaaaatattttcatttataataaattagacataagttatttaattgagtaaagaggatgattgtaaaatgaaatttgaaaatagagttcagcgttgtcgtcatttattaacaaaaacagataaacgaattatagaatatatacaaaagcatccacttgatgatagtttctcaacaattaattcattggcttatgcaattgaaacatcgccagctacaataacgcgtttcagtaacaaattaaattacgataattttcaagatatgaagtttagtttgcaacatgaaaaatcagagaaatctgtagaaaatgcaccattagtacaacttatacatcgttatcatcaaaatatcattcaacaaactggagagtttatttctgaggaaaaaattaaacgcttagcacataatttaaaaacatgtagacaggtgaatttcgcaggtttagggagttcaggtttaacagcaagtgaattttattatcgtgccatgcgtatggggataaaaggtttagtatccacagatgctcatcaaatgaagatttctgcgtcattattatcatcgaatgatatgtttgtagcaatttcaaatagtggggaaacaagtgagcttatcgatgcggctaaaatagcacgaaatcaaggtgcttatgttgttgtaattactaattttgaaggaagcacaattactaaaaatgcagatttagtgctgattacgtctgcacagtccaataataatgatacaagatttattaattcacaaattgcaactcactttttattagatcttgtgagttacattcttcttggagatccttacatgcataaactctatcaacaaacacgtcaagttgttctaaaccatgggagcaaataaataagaggactagaatgcgtagtcctccatgtttataactactattgtattgcaccgtacaaagctgcattattaccgcttcgagtcgtctgaagacgtgctattccataatgaggcggaaggtaataatgaattttaggcttaatatattttaatagtgtatctttttgagaagagatacctccaccaatcaagataagttcaggatcatagataatttgtaattgagcgataccttcagctactgaatggctccactcttctaaaatattgattgctacagtgtcattttcttcagctaattcaaataattttggtacgttagtgtcatacttaaagtgatgtaatagcattaaatcttttagcgctgaagttgaagctctttgttcaaatgttttgtcatcggaagaacgataaagcaaataaccaatttcatttgctcgatgacgtgcaccttgatagattccaatagatttattataaaatgcaccgccaattcctgttcctaaagtaagacaaaagatgttattttcttcataattatgcaaagaaagctccccaagtaatgctgcatctacatcattgtaaacagttatatttgaggacaattccttgaaaacatttaaaaaatttgtgccatcaaaattttgaatagttggtccagtgtaaacaatttctccacgagttgaatctacaacgccagcacttgagataccaatttgaggatttttaagctgatatttttttataaatgcatcaatgattaagtatatttcgttcgttattaaaatgtgaatattgtctggagtagcaatggttttataatcaataatgtttaattcattgttaattactgcaagttttatattagtgcccccgatatcaactgcaattttatacatataaaaaacctccttagttttctttataactactataaatcatttttagtcctctagttttaatttgaaaattattttcattaaatttagaattatttgttaatatttttcatatagtattgtataaaaatatgatagcgtttacaattcgaaatataaatagaatatattgctgttgaattaataataaaattataaaaaattcagatcatatattggaggatttcgaatggaagaacaattaaaaggattatatgcagcattacttgtcccatttgatgaaaatggtcaagttaaagaagaaggattaaaacaaatcgcaaagaatgcaatagaagttgaacaattagacggtttatatgtaaatggaagttctggagaaaatttcttaattagtaaagaacaaaagaaacaaatctttaaagttgtaaaagaagcggttggaaatgatgtgaaattaattgctcaagtaggttcactagatctaaatgaggccattgaacttggaaagtatgccacaaatttaggatatgatgcattatcagcagtaacaccattctattatccgttttcttttgaagagattaagcaatattacttcgatattattgaagcaacgcaaaataaaatgataatttatgccattccggatttgactggtgtaaatattagtatcaaccaatttgaagaattgtttaataatgaaaaaattgtaggagtaaaatatactgcgccaaatttcttcttacttgaaagaattagaaaagcatttccagataagttgattttgtctggatttgatgaaatgttagttcaagcagttatttctggagtagatggtgcaattggttctacatataatgtgaatggccgtcgtgcacgtcaaatttatgatttagctcgtgaaggtaaagttgaagaagcttataaaattcaacatgatactaataatattattgaaacagttttaagcatgggtatttaccctactttaaaagaaatattaaaaacacgaggcatcgatggtggagtacctaaacgtccattttcaccatttaatgaagcaaatcgtaaagaattaaatcaattaattgaaacttataacttgtaattacgacacaatttaaacgacagaatataaacaaggggtgatccttatgcaacatataggatttgggttatggaattggatagcagttatcgtctatcttgtggcaatgttattagtaggtgcctattttactaaacgtgcaagccaagatactgatagtttctttaaagcaagcggacgtttaccatcgtgggcaattggtttttctatttatgcgactacattaagtgcaattacgtttatgtctacacctgaaaaagcttttttaactgattgggcctatatagcaggaaatattgcaattgtagcaattattccaatattaattgctttttatgttccattctttaaaaaattacatgtaacttcagcttatgaatatttagaagcacgatttggaccaagtatacgtttaattggatcattattatttattatttttcacttaggccgtatcgcaatcgttatttatttaccaactttagcaataactgctgtatctgatattaatccatatattgtagcaagtttagtaggtattttatgtattttatatacatttttaggtggattcgaaggagtcgtttggagcgattttatccaaggtgtcattttacttggtggagcactgcttatcattatcatcggtgcttttgaaataaaaggtggatttggcacaattgtacatgaggctattgcgaataaaaaaattcttagcgcagataattggaaacttaactcagcagcagcggcgatcccaattattttcctgggaaatatttttaataatttacatcaatatacagcgagccaagatgtagtacaacgttatcaagcatcagaatctatggaagaaaccaaaaaatcattatggacaaatggtgtcttagcactaatttcagcgcctattttctatggcatgggtacgatgatgtattcattttatcagcatcaagaaacattgcctaaaggttttaatacatcatcaattgttccatattttattttgactgaaatgcccccatttattggtggattacttattgcagcaatattcgctgcagcacaatcaacaatttcatcaagtttaaattcaatttcagcatgtacttctgaagatattaaacatcgcttctttggaaaaagggatgataaatcagaagtgaaatttgctcgattaattattgtgatagcaggtttattaagctatggtatttcgatgtatttaattgcagcagattctaataatttatgggatttattcttacttattactggattatttggtgtgccgttagctggaatatttgcagttgggatattcacaagacgtgcaaatacatttggtgtcattgtcggactatttgcaggagtaattatcgcttatttacttcatggaataggtggaggaaactcaccattttacgtatcaattatttcatttttagttgcttttattttaggttatatcgtaagcttgcttgtaccatctaaaaatgtaaaagatattactggtttaacgatttacgacaaaaataaagcttctacatatatatctaaaatagcaaaaagaaattaatttttaatattaagagagtaggaaaatgaattcattgtcaattcaatcttactcttttttctatgctatgataaatttatatacatcacttatattggagaataacaatgaaaataataaaaattgttggtatgtttcttttagcgataatcattatggttatttctcaaacaatcgcgctattatttgatataattataccattttatggaatcggaacgattttatcgagtctcacttatattttacttacatttctcgtcgtaagatggacaattactcatgtatttaaagaaactctatcttcatatcgaatgacaaaacctgtatttcatccgatttatttgattttagggattgcattaccgtgcgtagtatatgcgatttattttatttttataccgggagattttaaggtacatcattttaactcaatcagtaagacgatacacgacttgagttacattatttttatgcaagctgcagctggtgctattgtcgaggaaatggtgtgtcgaggtcttttaatgggctatattgaaaagaaaacaaacattcgaatagcaatcatcgttacttcactgttctttggcgtcattcatttattgaatggtgctctaaatgtgacaagtttctttttattgttagttagtggcactttagttggtatgatgtttggtatagcaacatatcgatttaacaccatttgggcgagtatcaccttgcatttcttttggaatgtctttcaagttgtttatatcactacaaaagaaactgactataacgtctttcaatatgttttacgttttaaaaatatggtgcttacaggaggacagtttggttttgaaacatctatcgtctctacgataggctatatcattgtgattattgttctgttaatgtgccgtacgccatataaaggtagcaacttataacgcattcaaaagtagttgtaattgttctatacttaaagtaaagataaataaacgtcgttaaggagaaaagttatgaaaaagatagtgatagtgacacttattctcatattatctattggcttagtgggatgtcatcgattgtctaaagaggagagtgacccttcggacaatgcgaaaacacaagaagaacattcaacagaagaaaataagagttctgatgatcaagatatcagtctagaaccagatacaaaaataccggatcatgtttttgaaaaaacatcagtacgacatgtacagatttctgaaaaaacgattaaaaaagatattaaaacgtatagtaacattgataaaaaaatcaatgatacgatgaatacatataaaatgaaattatattccaatcaaaagttatctaacacagaagcgaacaaattaaaaaagcttgttcaattagagaatgagaatgatacaaattttgcacaatacattcaaaataatcagatgccaaataatgattatgtgatctatactgataaaataagtcgttatatttcaacagccaatcgcatagagcaaaaaagtttagaaatctcattaaaatcggatgatgatacatctatttttaatgatattgagcaagtgaataaagatcaagacattgtaaatgatcaagaaaaacaagatattgccaatttcttggaagataaaaatattaaaactgaaacatttaatgaggattcaaatcatattgatatagattgatcgaatgaattaaaaaaggagtggaccgacgaattcaaaatgaattccgttccactccttttttggcgaaatagttgtcgacttcatttaacaggtatccttttttagctaaacattgcgataaagtaactcacaataatcacaatacccgttacaccattatgaatcatatgaaccatcatactatctctaacgttatgacgacgatgataagcgagatagaacaccatccccattatgatatacattaagaccgcaacccaatttgaaataccatgttgggaagcaaaaataagtgaggataaaataaatggtaaccagaaactgctacgtttaaatagcgtttctttaaagatacctcgataaattaattcttctaaatagggagctacaaacgtaagggtgagtgcaaatactatgacaggaaacgcttgtccaagttgatcgggagaaggtttcgcgccttgaaagttacccagtaatgccttatcattttctgtctgtgcttgacctgttattgccatcattagaaaactcattccaatgacaataacgcgaagtaatagtgcccatccgatattaatcataatatctttgcgtttaaacggtttaattggctcatatgtatgccgttgataataacgtctaaccagccaaataacgacagcggctaacagcataaataataatgttgctagtgttccacttgtaacatccatttttgcagaaaaattagtaataaataaaataagaacaataggaatctgagcaagtaacatccatcctataaaaataagaacatttaagaagcgattccctttaggataatgttcatcttttttatgataatgagagtcaagatttgaatctgaatgcatacgtgtttctgtaataccttgttgagtcatggttgtatcacctctaatgtttttatttgaactacgtatactgcaacttgaacataacatactctgatttcaacctacaacttactttataaaatatttgaactatttatgaaaagagtgagacaaaactcgttgtcccactctttattttgaattaaccaatatttaaatgtttaccaggtaaagctttcaataaatatgaatcatgtgtaatgataattaactgtaaatgttgaaattctcttaacatttgtaagatgatatcttcgttcaccatatctaaatttgttgttgcttcatctaaaatcaagacatctggttctacaagcaaagcttttgctatccatagcctttggaattggccaccacttaaagtactcacttttttaccaagtaattgtgattctaacttacattgcgacatgacttcttttattctgtcctcatgtatagctttaggataatgaaaatgaattaaaggttgttttaatatccaatgaactgttttatttggatcaagtgtactcgaatgatattgaggcacatattggatatgtttcatccatttgtgttgtgaaatatggccaagttctaaatcgttatatatgagtgtaccttgataatttgaatctaatcctgcaataatttgagccaaagtagactttccgcttccacttacgccacttatcaataaatgatcgtgtgtctctaatgtataattaaaatttttaaatatctgtttattagaaaaagctttatttaactgtttaatctgtaacatattgatatctcctattagctagttcaatcaattgcttcgtgtaagcatgctgaggatcacgtaaaatatcagaagcacgccctgtttctacaatgtttccgtttagcatgacactgatatgtgttgcatagtttaagactaagtttaaatcatgagttacaaatagcactgtcatatcatgttctgtcactacatgatgcagtagagccattaaactatgacgattgtgttgatctagcgcactagtcggttcatctgcaattaaaaactgtgcttctcttacaatagccatgacaagtgcaactcgttgtgccataccaccactcaattcaaaaggatactgataataaatggattcaggttggtccaatccgagatgtttaaattgacgtaatacaaatgctttttgctgatcacgtgttaatgaagatgacatagagtcaaacaatgcatcaaagtggcggttgatacgaacattttggaaaaaattgcgattcgcatcttggaacattgcatccgtttgtgttaaatcgagatgaatctcaccacgataggttaaatcatcttctttcatattcagtacagtacgtgtaagtaaagatttaccactcccactttctccaattaaacaatgaaagcttcctttttcaatctttaaatgtatctgtttaagtaatggttcatgtttgtgataaacagatacatcattgatataaaggactgtatctaatgtaggtgacgacgattgagtatttgacatatgagtgcgaaccctcctaataagacacctggaaagataaataaccagggcgcagaatagaaataacttttaccgtcatgtaaaatggcgcctaattcaggaatagggggttttactcctaaaccaataaaggcgagaccggaaatacttaacattaacttaccaaaatctgcagtaacaagtgccataatgtcactgatgagatgtggcacaatgtgatgtattgtaacttggaacttcgacatcccactaagtggcgcaaatttaacgaacggttgtgtcatcgtgtcacgtgctaaatttctgaaataccgcaaatagcgaccgagccagccgatgatgagtgcaagacataatcctactacagaattattaataaaaccaaggacgacaagcgcgataatgatagctggtaaagcgattaacatatctgcaagtgccataatgatagaatctaaccatttacctactatagctgaaataagaccaatgatcagtccaagcacgattgtccctatcataatgaatgcagtaagaccaagtgtaatcaagctacctacaaatagtcgtgttagaaaatctctacccaaatcatccgtaccaagtaaatgatgtaaacttgggggacgtaatgcttgagattgatgaatttgatttgctttatcatataggacataagcgagtacagctaaaatgattattgcaataggccatatgaaatgtttaatcttcatacgttactcgccctcctaacgttttcgacatattcaaacgagggtcacttttttctagtaaaatatcacccaggaaattcaatatcataatgattgtaatcatcatcattagaatacctagaatgagtggataatcccgaagattaatactaataataagcaattttcctaaccctgaaatactaaaaatgacttctaaaataatgactcgactgaataaacgaataaaattattaattgtaatcgtaagtaatggcgctaagatgtctttaacttgtacgtaaatacgatcttttaatttaaactgacgtaatgaggcaagttggtatgcttcattacgaagtgtacgttcaaatagatgactgctgagtaaaaccatatgactcccttcaactaagactaaaatagcgataggtagaataaagtattcaaagctataacttccaacaaatggtagaagatgccatttcacaccgaaatagtaaataaaaataatggctaaccaatattctggtagtgatgtcaccacttgagacgcacgtaatatgaatatagaccactttttcttaggataattcccacagagatagccaataatatagccaagtggaaataagatgatggctgagataaaaataagtttcaaggtaggagcaacggctttagcaatacggtcagtgacaggctcgccgttactaaagctcgtgcctaaatcgcctgtaaatgcatgacctaaccattgtaaataacgaataggcaatgcttggcttaatccaagtttatcttgagccatcttaattcgttcatctgtgatttgtgcgacaccatgttcatgtagatattgaatcgctggatttccagttgtatgttcaagtagcacaaataagataaacgaaataataatgaaatataatataagtttaagtaaatgtttaatcatactaatcatgatgagataccttcaatttatcgtaattaatgggtgcatccgtttgtcctgagaattcgaattgcttaattttaggacttgtaacaaacacttcgtttggataagcaattggcacttcaagatactgttgattgatgcgatgtgagatgtgattaaatgcacgttgttgatcatccttattggtaatggttgagaagcggttaagcattgttgttagctgaacatcgtttgcgaacataccgggcttatctccgtcttgcttaaagcgtgcatttaaaaagttatatggcatgagcgcattcgtataagaacgatagaaaataagatcataatcttttcggatagtgagtgtttcataatacgtttgggcatctaaaacgttaatatccaaatgaatacctacgtttttcaaatcttgttgcataatttctgcttttgttttccattcaggaaattcatcagtttggagcgctaattttaaagaaaggtctcgtccatttttttcaaagtagccccgatcattttttttatagcctaattgttctaataagcgtgtcgcttgagtaggattatatgaatgggtgtgttgatttgtatcattcacgaattctacgccgtcttggaataatcctttaagctgcttatttgatgataagtgatcagtattaatcgctttactgattacttcgcgcatctttttattttgaagtaatgagacctctggattaaaggccatgaactgtgtttctgtacttggatattgttttacctttaaatcttgattacggtatgattccttgatttgttgaggagtcaaatgtcctagtgaaccccctgtaatatcaatagaatgactttccattgcaagatgtctcgaatcgctatcttcaattgtttgaaaaattaaatcgtaatccaatggatgatggttgtgataataaggattcggtttaaaagtcacagtctcatttgttgaatctgctactttgaatggtcctgtaccaatcgctttttcaaattttccagtggttttaccatcttttaccgcatgtggactcatgatacgtagcggacgtatttgtgataattcatttaatacttgatttgatggcattttcaaatgaatatctacagtatagttatctttaatagtaaccgacttcagtttatctaatgtttccataggattcgttttatctgtcgctttcgcacgttcaattgaaaatttgactgctttcgcatcaaagttcgaaccatcattaaatttaatatggtgttttaagtgaaacgtataatcttttccgttattagagactttccaagatttagccaaaccaggctcaatctttccattttctccatatgtaacaagaggttggtatattgcactgtagacaggcatcggaacatcaaacgcttgtgcatctaactggctcgggttaaattctcgtgcaagagatactttcacctctttgtgttgatgatgatcatgtgtacatccagttaataggagagacgcacacatcatgaatgacaaaagcagatgctttctcaaatttaaaacctctttcaatttatatttgtcacttattaataatacacggtaatatttattttgaaaataaaaaacgtctacaaaattatatattttgtagataaaaagaatcgttttaattatagaatttgtatcttatatatcactaattatcttattttctaatgtgtttctcctaaagctactttaacatcagggaggtctgaaatcgtattgattgctgctgtaattccttttgtaatcgtatctaaagacagcgaaggtgtattaggtttatctatgacttgttctggaataaagggaacatggataaagccaaatcgtaagttaggataaaacttatctgcaaggtagcctaattgataaagtacatgattgcagacaaatgtgcctgcggtattcgataaacttgctggaacacccgcttttttaatcgcttctgtcattgattttataggaagatttgaaaagtaggctggtgcaccatctggatgaatggcaacatcaatgggttgatttcctttattatccgcaatacgtgcatcatcaatattaatgcctacacgttcaggtgtaatattaaaacgtccccctgcttgtccaatcgataataccacgtcgtaatgatgatgttctaattcatgttgaatcacatcttttgatttgtgaaatacagttgggatttctaatgttgtaatggtatgtgccccaatagtagggtccagttgtctaaccgcttctaatgccggatttaccttttctccgccaaacggatcaaatgcagtaactaaaatattcataagaaaacctctcctttaattttttacagtttaatacgtaaggtataaacacttatttacatcattaaacagatgatgatataaggcaacgtaaaagatatatgaacagtttgtgaattatttaaaattaagaataaaattaaactagaagggtaaaataattatgtaaaaggagtggtattatgacaaaaacagcagtcattacaggttcagcagcaggattaggaaaaggaattgctcaacgtttagccaatgatggatttaatattgtgattcaagatattaatcaaaaagctctagaaaaaacagaacaagaatttaaagagaatggatataacgtggtagcatttcatagtgatgtttctaagaaaaaagagcaagaagaattagttcaatttgcagtggcagaatttggtcaaattgatgtatttgtaaataatgctggtgtagatgcggtatcacctattttagatattacagaagatgaattggataaattattccatataaatgtatatggcacgttatttggaattcaagcggcagcaaaacagtttattaagcaaaatagtaaaggtaaaatcattaacgcatgcagtattgcaggacatgaatcttatgaggtattaggtacatactgtgctactaaacattcagtacgttctctcactcaaactgcagcgaaagaattagctgaaaaaggtattacggtgaatgcttattgtcctggagttgctaaaactgaaatgtgggatcgtattgatgctgaaatggttaaattagatagtaatctaaaacctggtgaagcatttgaacagttctcatcagcaattaaactcgggcgttatcaagaaccaaaagatgtggcttctttagtatcattcttagcatcatcagattcagattatattactggacaagccattttaactgatggtggactagtttatagataaaataaagaatgataaaagtgaaaaaataacaagcctctcttacaatttaatgtaagagaggtactttattagatttaaaaatatgttagtcattcactttttcagtatataaccctttattctttctcgaaaagactaccaaatcgtcacgatttattaagtcatcggtaagttgtaattctgtaatggtattcgagtcataatatttaatatagagtgtttttgtcgttaaattaaaaacagtttgatataacgtataataaaatccattgtctgaagggcgaacagcgccttttggtacactcacatggtctaaaattctaaatgcatctaagataggatggtcatcgctatttggtaataagtgatgaacaagataagctgctcgaacaaaacgttcgccagatgtataccctccaggtaaaccgaatgtgccattcgtattccctaagttcaattgttttgaaaatgtattgtcaatgttatatggtgtcacatgcataaagtgtttcaaattttcataatgccaatttaaatctgggttatttgtgagcacgccaattggattatcaatcacgacgatgcgaccatcaacaaatgtcacttccacagtgcgccctgtcgcatcagataaatgataatgtaatggaggaacttcgttaatatcactatatgaataggctacaacgttaacttgtttcgcattttcaataagttcttcaatagttctgttatagccgagcgcccacacaaggacttctgtttgcgaaatattgatatagccttcacgaatgtctgtcgcatatgacgcatatccacgatcgtattgatttgacatggcaagtccatgttcattgacgccatctccaaaaacaaatccctccatatcagaaccagcacctgcaaaggcatacaacgtttccccttcatagtcgacatgcgatttaaaggagtatcctcgaggttgaactgcaggaaagccgttcaaaggataatcgtaatccatcgttcttccaaaaataacatctccattgctggcttgaaatgtaatgcctgtacacatatcgtcgtctcctcgtaaattaatttttaattgctgttttaaaatataaacctaaaacaaatgttaacacataagcaacgctactaattacatatgcccacatcactccttgattatctacaacaagagaaatacctaaagtaccaagtgagaaaaatatactgcttaataaattattcagtatataggtggatgttagggcttcttttggtacttcacgttgtacaactgagtttaaagaaatatagcgtgaatcttcgaaaattcccattaataatgacatgagtaaagcaagtaacacagattgatgtaggataaagctggcattaataaaagctaatatgagcggaatataaataataatagggtaacttatttttgtgaaaaattgatctttatcattcatccataacccagcaataattgtcccactaaagaaagcagcattgatgagtccaaaccaaaaatcatcgacatgtaaaaatgttctcgtatatgtaagaataattgcagcaacccaaatggacgttgcgacagattcgaaaattatagatagatttagatataaactcagtttattggaatagttatgacgtaatacagttttaaagctatttaatatattttctttttcattattataaatatgccgttctgaaagttgaataataaagaagtaggataggatttctagtacaagcgcaaataaaaataaatatttagcgccaatcagactcatcagaaatccacctaatgcccatgtcgacaattgaaccatactactcatcatattcattaaagcgttcgccgaagttatgtattctttcttttcaataaaaggaatcatcgcgttcttaattggattggtaaatccatcaaatagagcatttataaatagtagaataaaaataaatattggagattcctcgaatataagtagacttgcgatgatggatagactcacaagtttaagcccttggaaaatccataatacttgtttttgagtaaaatactgataaatataatttgaaataaagctactaacaaagagaccggaagtaaaaataattggaatcatagaagcggcagtcgtttttgaggtcatactatatactaccgaaattaagccgacaacggttaacacgtctccagtatttgcgaatagctgactataaaaaagatggaagtaatctttactgtgcttcttcataacaatcaccttaggtaagtttcaatttaagttattatagcacagtaattatgtaaaagtaccctttaaaagtaggttgatacttataaagggtacatgtcattatgcgtgaatatgttcaggaacatctttaaagttttctaaacgacgattccattcctcatcactaatatggtgttttgcaacgtagcgattacgttcatgtttggcacagtcatatgaacatgcgccaagatattttgcttcatttttttcggatactaaaatttgtttattacattctggatttgcacagttaatataacgttcgcatggagtgccatcaaagtgttctttaccaatcactgttttatctacatggttcacatcgacactaatacgttcatcgaagacgtacattttgccatcccagtactcaccttttgtttctggatctttaccatacgtagcaataccgccatgtaattgtcctacattttcaaagccttcttttacaagccagcctgagaatttttcacaacggatgccacccgtacaatacgtcacaatgtttttaccatctaatttttctttattttcacgaatccaatctggtaaatctctgaagcgtgtaatatctgggcgaatggcgccgcggaaatgacctaagtcaaattcataatcattacgtgcgtctaaaataacagtatcgtcatcttctaatgcagctttgaactcactaggtgagtaatatttaccagttgtcacacgtggatcaacatcatcttctaaacctaaagcaacaatttcttttctaggacgtacgtgcatttttttgaatgcatgtccctcagcttcatcaattttgaacgtcatatctttaaaacgttcatctgcatgcatatgttcaatatattgatctgtatcttcttttgtaccagataatgtaccgttgataccttctgtagatactaagattctaccttttaagttatgttctttacaaaatgctaaatgttcagtagcaaatgtgtcagggtcatcaattgttgtatatttgtaatacaataacactctataatccattttctgattctcctctaaaagttaatttatctgtatgttaaacgtatctaaattgttatttatataaaaatcgacattataatattttaacaaaattataacttctttcaatatttgcgctcataaatcagtcaattgacctatacaaggagaatcattttacttattgaaatcgattacatatagtaagcttaagtttagaatgtttcaagcgtataataaactatgtaaatgaatgacataaggaggcttatttaatatgttggataataaattacctaaattaacgtatagtggtaaatctaaaagtgtagttcctattgtttctgaaagtgaattacaaacagtcacagctgaaccatggttagaaatttcagatgaaggacttcaacttgaaggacttatttttgatagagaacataacttatttttatgtgaagtatttggtggaaagattttcaaagttaatctaccaagcaaagatatttctgtagcgtttcaatcagaaaaacaaaatccagctgcagtaaaaattcataaagatggacgattgtttacatgttacttaggtgactttgaatctacaggtggtattttcgcaacagatgaacatggagaatactttgaagacattatttcagacatcaatacagattattgtattgatgatatggtatttgatagtaaaggtgggttttatttcaccgactttagagggtattcaacgaatcctaaaggtggcgtctactacgtttctcctgattttaaaacggtgacacccgtgatacaaaatatttctgttgctaatggtatcgcacttagtaccgatgaaaaagtactgtgggtaactgaaacaacgacgaaccgacttcaccgtattcaattagaagatgatggtgtgactattgcaccgtttggagcaaccataccgtattatttcactggtcatgaaggacctgattctgtttgtattgatagtgatgacaacttatatgttgcaatgtatggtcagggtcgtgttctggtctttaataagagagggtatcctattggtcaaatcttgatgccaggtcgtgatgaagggaaaatgttgcgttctacacatccacaatttattccaggtacaaatcaattgttaatatgtaccaatgatattgagaataattcagaaggtggatcaatgatttatacagttgagggattcgctaaaggacatgaaagctatcaatttcaatcgtaaatagctataaattacaattaaaaacatccttacttatcgtagtgagggtgtttctgaattgtattattgtagataggattttaattaaaaaaagataagtatcatgtgaaacataaatagatatcgattatactaaagaaaagaataggacatacatcatgtatgagaggagtattggatgaaagacaattggataacacataaagcagatagtctcgtaggatcattctatgaccaacaatcatatcaatttcaacaagaagggtttgaaacgacactttcctttggaacagcaggtattcgtggtcaatttggtttaggtccaggacgtttaaatcgatataccattcaacgtctagctttaggaattgcatattatttacaagataatatggcacaaccttccattgtcattcattatgacattcgtcatttatcagcagaatttgcagacattatcgcgcatattttagcgtctcatcatattaaagtatatgtatcggatacatatcaaacgactccgcagttatcttatgcagtgagatatcttcaaacgtctgcaggtattatgattacagctagtcacaatcctaaagattataatggcattaaagtatatggtgctgatggagcacagctcgacgatgtcgcctcacttgaagtagctaagtatattgaacaattagatgatccacttcatttagacattgaattaaatgagacgttaattaaagaaaatattttacctttaccaaaagatattaatcagtactattttgcggaaattaaccaattgattggtgacatacctccatcaaacttaaatgtggtgtatacgagtttacatggtacaggaacacctattattccgaaggtgctaagccatcttcactttaataagattgaacttgttgacgcacaatgtaaaattgatcctgattttagttctgtaaaaagcgccaatccagaagaacatgaagcgtttgatctagctatcaaacaagcccaatactctaaagcggatttaatcattgcgacagaccctgatgtggatcgaatgggattcgttgaacgagatcatgatggtcatattcactattttaatggcagtgaaataggtgcgttaatgattaaatatttagtcgattataggacgcttcctaaacagccagtcatgattcaatccatcgtaagtggtgaactagggaaacgtttcgcaaagcaacatggggtcactgtgaaggaagtcttaattggttttaaatttattgccaaggccattcgcgaattacgtgaggatgaaacatttattttcgcttatgaggaaagttatggttaccttgcgggtgaatttgtaagagataaagatgcgattcaagttgttccgttagtcattaaatatgcgtctattttaaaaaatgaaggtaaaacattacatgatgccttaacggatatatatgaggaagtaggatattatcgcgatcaacctacatctaaaatatttgaaggaaaaaaggggcaacaagaaattgcaacgttaatggaacaccttcgtcaacacattccagatacgttgggcggattaaaagtgatcgcagttgaagattatcaaagccaagagagaataaataaagatgatggtactactgagtcgatagctttaccaaagtcaaatgtgattcggttaatctttgatgaaggatttgtcgcattacgtccttcaggaacagagcctaaactcaaattctatctttcacttaatgttgatgattttgaacaagtgtcgcatgatatctatcaatatatatttaatgataataaataaaaatagaaaaataagtgtaaaagaataacaccttatatcgagtctttgtactcgtgatataaggtgtattttaattaattattaatattttcttaaaaagtcgagttgacgatgatataatttatcagcaatataagcttggacgcgtgtaagcacttcttcaatttcttgtgtcagattagataatacacggactgtaaaaccatgtgtaggtaattgcgtaataccaatacggcaatcgtattgctttgtataatctttaatttcatcatacacatcttcaatgaatttttgcgttatattagggtgtatacaataagccgaaccaagatgtgtatagttttccatatagccaatcgaactcatttttgtttcacttgggtgcattcgtaaattatcgtaggtgataagcacatcatctacataaatttcattaattaaatgcatgtagtcgtaagtgaatggtgtgtctttttcagaatagcctggggttaaaatatcggtatagaacatggatgcacttttatctaaattaaagacgttatgttggaaaaactttgctctttcataagcaataatagggtctcctacatattccatataaccatcttttgctatattgaatgtttggtattgtttcacgcaatcgtttaacgtcttatatattttagttgcaccttgagatgtcaaagtgactttagcatcttcttcaacattaatatccatacgataacgatcgccatctaaataaccaccgccaacattgacgatataaaatgttggaatcgtagagaaatttaaataaattggacgaataacctttaacgctttttcgaaaaagatattacgggcaacagaacgctcaccattattaaaaactgtgagattcaattgtccagtccaagaaggttttgaatcgaattgatgttgtaccattaagctaatcctttaagtaatgcatcgcgttcaatccattcaatgacattatctaaaccctcgtcggtttttaaatttgtaaatgtgaagggacgattgccacgaaatgttttagtatcttctgccatttggtcaagtgatgcgccaacaaattctgctaaatctgttttattaatgataaagtaatcagatttaatcataccttgtccacctttacgtggaattttttcaccttgagctacatcgatgatataaatagagaaatctactaattcaggactgaaagtagcagctaagttatcgccacctgattcgatgaaaataagttcaatatcttcatgacgatctaataattcatcgattgcagcaaagttcattgatgcatcttcacgaattgctgtatgtggacagccacccgtttccacaccgataattctatcttctggtaaaacaccagtattcactaagattttttggtcttcttttgtgtaaatatcgtttgtaatcacgccaatactcatatcttttgatagacgacgtacaagtttttcaattaattgtgttttacctgcacctacaggaccgcctacaccaattttaattggatttgccatgtatattacctcctatgaaataaagattctcacgtttacgttttcatgctccatttgattaagctctaaaccaggagctgttaaaccaaagtcttcttcgtttaatgtgagaatatgttgtcgtgtacgctcgatatatggaatcatctccgtcacaacttgttgtcctattgtttgacctaagggaattgcacgtactgcattttgcgttaaactggaaacgttctgatatagatagtaatcaataatcgtttcaatatcgacgcctaaataatgtcctagcattgtaaaacaaatagctggatgcagttttgcacgtttatctttcatctgttgatggtaccatttaatccatggactatcataaagttccatggccagttttaccatacgtgtacccatttgttttgcacctatgcgtgtttctcttggtaaactttggacataaattaattgatcaaggtgtaatactttttctgtatcaccattatttaaagcgttataaactaaacgcattgcaagtccatctgaatacgttaactgttcatttaaaaagagttctaaccattctttaaatgaatttgcatcgtgaacagcttgacgttgaatatatgtttctagtccaaatgaatgactaaatgcgccagtagggaattgtgaatcacagaactgaaatagtcgtaaatgtgaatgatcaatcatgtgaatgacctatatgtctgaaggctttattcacttttcgatcttcatggctatagggaatacctagcgtttttaataaatcttctactaggtagtcatattgtacaagcatttcagtttctgtgaattgcgcaggtaaatgacgattacctaattgatgcgcaatatctcccatttcttgtatgttacgtggcttaatgacaagtaaatcttccgagtttacatctactacaatcatattgttgtcatcttgatataaaatatcgccatattgtaaatcgataggttgttttaaacgaataccgatttcattaccgtgatctgttgtgacacgttgaatacgtttaactagatcagagttttcaagatatactttttctacatgcttttgtttttcctctgcagaaaggttagcgatattgccttgaatgtcttctactatcatctgagtacctcctagaataagaagtatctttgtgctaatggtaattcagttgctggttcacttgtgattttttcaccatctacaaatacttcatatgtttgtggatcaacatctaatttaggtgttgcatcgttatttttcatatcttttttagtaagattacggataccatggactggtcgaaccatacgttctaagtttagttggttataaataccgttttcgtatgctgttttagaaacgaatgtaatcgcagtgtgttgtttatttgcaccatattgaccatacattttacgatatttcataggttctgatgtcggaatagaagcattcgcatcaccattcactgctgagttaatcaatccacctttaacaacaagttcaggttttacaccgaagaaagctggattccatagaactaagtcagctaatttacctttttcgattgatccaacatagtcagaaataccatgtgtaatcgcagggttaattgtatattttgcgatataacgtttaatacgattgttatcgttatagtcagtatcaccttctagagcaccacgttgttctttcatacgatgtgcaacttgccatgtacgtgtgataacttcacccacacgacccatcgcttgagagtcagaacttaccatgctaaatacacccatatcttgtaatacgtcttcagctgcaatcgtttctttacgaatacgtgagtctgcgaaagcaatatcttcagggatagatgcatttaaatggtgtgtaatcataaccatgtctaaatgttcatctacagtattatgtgtgtaaggtaatgttgggtttgtagatgacggtaagatattcggatacgatgcagatttaattaaatctggcgcatgtccaccaccagcaccttctgtatgatacatgtgtaaaacacggtcttttacagcggccattgtatcttccatgaaccctgcttcatttaatgtatcagcatgtagagcaatttgtacatcaaattcatctgctacatccaatgcatgacttaacgctgaaggagttgcaccccagtcttcatgtacttttaagccgatcacaccagcatgaatttgttcaattaatgcagtgtggtttacagcttgccctttaccagtgaaaccaacattaattggtaaatcttcagcagcttctaacatacgatgaatataccatggtccaggtgtaacggttgtagctttagcaccttctgatgcacccgtaccaccaccgatatgtgttgtcacaccactttcaagcgcaacttctgcttgttcggggttaataaagtgaacgtgtgtatcgataccaccagctgttacgattttaccttcagctgagataatatcagttgttgaaccaataataatatctacattatccatgatatcagggttacctgctttaccaattgcaaagatataaccatttttaacaccgatatctgctttaacaattttgtcataatctataattaatgcatttgttaatactaagtcagccactttgcggtcatcgcgtgtaacgttagggttttgagccatgccatcacgaatagatttaccgccaccaaacgttgcttcttcaccgtaatttgcataatctttttcaacagttgcaaataagttggtgtcacctagtcgtactgcatcgccaacagttggaccatataaacttgtatactgagattgagtcattttaaagctcattactgtttacctcccattttgttcatatttttttcgccattatcaccttttggcgcagcatattcatcgtttttaccagttggacgataaacgcgatcttcgtcaatttcaccgttaactaaaccgcagaaaccataaattctacggttaccagcatattcaacgagttgaacttttttctcgtcgccaggttcaaagcgaacagcagcaccggcaggaatatctaagtgtttcccatatgctttttcacgatcaaattttaaacctttattggcttcaaagaaatgaaaatgtgaaccaacttgaattggacgatctccagtatttttaacattgatcactgtttcaaaatgaccttgattaatttcaatttctgtattttttattttaatttcaccaggtttcatttataaatcctccttacacgattggatgatggatagtgattaatttagttccatctgggaatgttgcttcaatttcaatatcagtcaacatgctatcgacgccttccatgacatcatctttatttaaaatttgtttaccgtaactcattaaatcagctacagttttaccatcacgtgcaccttctagtaattcatcactaataagtgctaatgcttctggataatttaattttaagccacgtgctttgcgtcgacgcgctacttcagcagctacgacaatcattaatttatcttgttcccgttgagtaaaatgcactgttatgccttctttctttttaaaataagtactgcaacattaatcataaaactgtagaatatttttaacaagtaatttatcttttaaatttatttaaaatcactttttcaattaaatttgtatatatttttaatgttacaaaagtgtttaaaaggtataataattagaaaggaaatgaataaaataataaaggtgagtttatgaaatatgtagagattttcttaaaaaatattgctcaagtcgtatttatgaataataaatggtcagggctgtgtattctgataggattatttattgcaaattggaaagttggattaggggcagcagtgggaagtctcattgcacttgttctagcgccgtactttaattatagcgaggatgaaatccatgatggattagctggatacaattcagtattaacagcaatcggattagcgttattcttagaagcatctttagtgaattggattgtacttattgtagcgaccactcttactttaccagttggagctgcaatccgagaaattttaaaaccatatggtctacccatgttaacttttccatttgtctttatgacttggttaattttagcaatgggcatgcaattttcaaaaatgcatatcacaatagatattttgcctactaaaattaaacatccagacatcagtcattcacatgtgaattttattagcggtatcattacaaactttagtgaaattttcttagtgacatcaatcattggtagtctgttaattattattggtatttttattggttcagtaaaaggcgggatctatgcagtagtatcaagtattttagcagtgatatgtatcacattactaggtggagactatcccactattactgatggattgtacggctataactcaatattaacgggtattgcgttgggtgcgacgtttaaaacaaaattcaatccgattcttgcagtgattactggtttattattaacagtagtgatgcatggtgcattagctacaacattagccccaattggtcttcctattttcaccgctccatttatttttgcaacgtggcttgtgatgtttgcaggtaaagagcagcatgaagttaaaagttagaacatattaatgagagtgagaccgcatttctttttaaatgtgttgtctcactcttttttttattatttatgctaatttagatatgatatggatgagaaagaaaaaggagagggttaatatgaaacgtatatatgttgtgggaagtatgtcgatggatttggttgtgtcgactgaccaagtgccaagtaaaggtgaaacagtattaggaaatacatttttcactacaccaggcggtaaaggcgcgaatcaagcagtggcagcagcaagattaggtgaccatgttcacatggtaggtgtattggcgatgatatgttaggtaaacaaattcttgaaaatctaaagcataatcatgtaaatgttgaatatgtaaaaaaagtaaaaggaccttcaggtactgcacacattacactagctgataatgataatagtattattgttgtaccttcagcaaatcataaagtcacagtctctttggtagactcagctttatcaaaagcaaataaaggagatattgtgttacttcaacaagagattccagctgatgttgttgctcacactgttcattattgctatgaacatgaacttacttctattttaaatccagctccatatagagacatttcagatgatatattggaacaagtaacatatttaacaccaaatgaaactgaaagtgaaaatatgtttgaaggagacattgatcaagcgttagaatgttatcctgataaattgattgtgacacaaggtgcattaggtgctgtattttacgatggtttagaacaaattgaaattcaaggaattgaacgagaagtaaaagataccacaggcgctggggatacatttaatggtgcgcttgcagtcggattacaaaaagacgattcgcttgctaaagctattgcatttgctaatgtcgccgctagtcattcagttacagcacttggcgcacaaggtggtatgcccacaataaatgatatagctcaagatttagatatgtaggttttgtatataaacgtgttaagtctattttaaaataagcgtattcaaaagttgaaacacatctattataaataatataaaattattatataatgttggaaggtattataatatttctataacttaaaggagtaactatatgactaagacatatttacttagcacgcttattgttttaatatctatagttttatgtgcatgtcaattttcaacattgtcatcatcaaagaaagacactaaaaaggataaagaaaatatcgcaaatatatatgcgaaaaaaagtactcagaataaaaaagattggcaagtgtatcaaggtgatattgcacatgtattttatcatccagtgattactgaacctaaagtagcttttacacaagagaagaatcaagctaagggtaattttgattggatgattacagctgatgagtttaagcgttcattaaatgaactctataaacaccattacatattaatagatccacatgaggcttatgatttaaaaggaaagacagttactagaaaagaattaaaattacctaaaggtaagaaaccattaattttatccattgatgatatgaattattatgagtacatgagaggtcatggatatgcagatcgtttagtgttagatcagaaacaacatgtcgtttctgaaactaaagataaaaatggtaaggtaacaacaagtgaaacaaatgatattgtacctatattgaatcaattcgtgaaagaccatcctgacttttcactcaatggtcaaaaaggcgtcgttgcgctaacaggatacaatggcgtgttaggttatcgaacaaatgagttaaataataaagattatctaaaacgtaaaagagatgctaaaaaagttgtcaaagcaatgaaaagagatggttggacatttgcaagtcattcatggggacatatcgattttgcaaatagttcatatgatcaaattattcgtgatacgaaacgttggaaaaacgaagtagagcccattataggcaaaacagatgtatttatctatccacacggtgctcaagatagagggtctaaagcatatcaatatcttgttcatgatgaaggatttaaatttttagcaggtgtaggaccaaataattttacagatatcggcaatgatagtgtctatcaagatcgtgttgcgattgatggattaaatttatatgattttaaatataaattaaagccatttttagatccgagtaaggtgtatagtgagaaagatcgtcaatattttaaaggagataaatcctatcaatagtatgctataaacaaaagagttggacaaaattcataagactatttgttcaactcttctttattttataattaaagaatatatattagatacttagttgtaattcgcctataaagttgttataaaatatattatacaatattataaaaataaaaagtaggtaatataatgtttttgaaagtaacacaaagtattggaatacttagtttatttacattattaggaacttcaatctctcatgcagcagaaacacccgttgatattacaaataaagaaggtaatgtcgcagtaagttcaaattatgaacctgatggtgtaacgcttacgacacaacaaggccaaatattatataatttccaaggaaataaagaagcggatcctgcttctttgtctaaaatgatgaccctttatttaacattagaagcagttcatcaaggaaaacttaagttagacgataaagttaaaatcacgagcgcgtatgatcaattatctaaaaagccaaatttaacatctgtccctttaaatcaaggtcaaatatatactattaaagatttattaacacaggcagccttaccttcaagcaattcagccgcaatgattttaggagaacaagtgagcggcaatacgtcaacgttcacagacaaaatgaatgcacaagctaaggcttttcatatgaaacatacacattttgtgaatccagcaggtgctgctaatgatttacttggacaacaagcaccaaagaaatatagaaaagatatttatcctaaaagtacgtcagaagatattgcgatattatctcatcacttaatcgccaaacatccgaaaattttaaacataacgcaacttagtcaagatactcaaaaaggttatacttttaacaatactaatttatcaattaaacatgagcccctttacttaaaaggtacagatggattgaaaacgggtacgagtgataaaggatataatattgctttaactaaccaacaaaatcaccttcgactcaatgaagtggttatgaatgtggcaccgtatatggataataatgctaaatacaatcgtaatcgaatagggaatgcgatttttaaacattatcgcaaagaatatgaatacaaaaaagtattatctaaaggagaacataagattggcggtaagacatataaagtagataaaaatttatatgataccgttcctaaagataataaaaaatgggatatacgaatcaataaagacggaaaagcctatgtgcattataaacgtgatttcttaccagaaacgacgtatccacgagtaaatgctaaaaaagtatggaaatggttctaaataaaagcgggatatcctttaccgtactattaattgtgagatgaaggtcaaacaatttaataagtcagtacgatatttgtttcccgctctcgttttattttaataactttaaatgaacttctctcgctccacaaatcatggtaacgatatctgaagacacgtcatcaatggattgttgaccatactgaatccagtttagaataacgcttaaaatgcctccagctagaaattctccataaatgaactcatctatgtaaaattgtccaatttgtttatcaaattcaatttgtcgtttaaccactgcataaatttgattatataaaatttgataaacttcactataaatattgatagaaatgacactttttaccattgctttgttatcactaatgaaaagtaaaatatctttcataaatttattgaaaaattgtctcggatcttttgaatcaatttcaggcaaatgtaacgttcgaaaatattcaattaatgtaccaacaatatgattaagtaaatcatacttatcattgaaatgacggtaaaatgtagaacgacgtacatttgctttttcgcataaatcttgaatcgtgatattgtcaaaagatttcgtttcaagcaaatctgagaatgtagtaatgagtgctttttttgttcgttgtacacgtaaatcttgattattcatgttgttcacctctcatttaggacattttatcaaaaatgtcacttaagttacattttcacttaactgactcacaataatattttataaaatgattataatataagcgaagggtagattaatttctaaagcgtttacttatagtttactacttttcatagattacttaaaaatataaataaaatgagaagtgaatcatatgtactatagtaatggaaattatgaagcatttgcacgtccgaaaaaacctgactatgttgcacaaaaatctgcttatcttattggctctggattagcatctttagctgctgcatgttttttaattagagatgggcaaatggatgggtcaaacattcacattttagaagaattatctaaatctggtggaagtttggatggaactgaacttccaatgaaaggctatgtcatgcgtggtggcagagaaatggagaaccatttcgagtgtttatgggatttatttcgctccatcccatcacttgaaattgaagatacttcagttttagatgagttttattggttaaataaagaagatccaaactactcacgatgtcgtgttattgaagaaaggggtcaacgcttgcctacagacggagactttactttaacgaaacaagcaatgaaagacatacttcaattatgtttgatgaaagaagaagatttaaatgatgtaacaatttcagatgtcttgtcagaggatttcatgaattcgaacttttggatttattggaaaacgatgttcgcatttgaaccttggcattctgcgatggaaatgcgtcgttatttaatgagatttgtgcatcacattggaggattagctgattttagtgctttaaaatttactaaatataatcaatacgaatcactcgtacgccctatggttgcatacttaacgtcccatggtgtgcaatttgaatataatgtccaagtgcttgacgataaagtagatgttactaccaaagacaaagttgctaaaacaattgaactaaaacgaaatggtaataaagaaacgattcagctcacactcgatgatctcgtatttattactaatggtagtatcacagaaagttcaacatatggtgataatgacacacccgcacctcctacaaaagatattggcggaagttggaacttatggcgtaacttagccaaacaaagccctgagtttggtaatcctgaaaagttttataaagatttaccagataaaagttggttcgtctcagcaacggtaacgacaaataacaagacggtcattgaagctatcgaacgtttatgtaaacgggatccattagctggaaaaacagttacaggtgggattatcacagtgaacgattctaaatggcaaatgagttttactgtgaatcgtcaacaacaattcaaacaacaacctaaagatgaagtgagtgtatgggtatacgctttatattcagatgagaagggcgattatatccataaaccgattgttgaatgtagtggtcatgaaatatgtcaagaatggttatatcatatgggattacctattgatcaaatagaatgcctcgcaacacaacattgtaatacgattcctgtatatatgtcttatatttgttcatatttcatgccaagagcgattggcgatcgaccacttgttgtccctcagcactctcgtaacttagccttcattggtaacttcgcagagacagaaagagatacagtgtttactacagaatattctgtaagaacagcgatggaagcagtttatcagttactggacatagatagaggtgttccagaagtcatggcgacagaatttgatattcgtgtcttattagatgcgatgtatgaacttaatgatcgtaaagacttgaaaacattagccgagcaaaataaaatacaacaagttgcattacacacgttcttgaaaaaaataaaaggtacgtttgtagaagaactcttgaagcaacataaattattataatagtgtgtaggtaaatgttaacccccgcgtgtttgagggcatgcgggggttaaatcattattattcaatatatcgtcttaaatgttttgctgtaacagagttgttaatatctaggagtcctttaggttctccagcatacaataattgtcctccatgtttaccagcaaatggtccaatgtcaataaatccatctgcttctgtcatcattgttaaattatgttcgattaaaataacagtattccctttatcaatcaaatgattaaagcattcaacgagaataggtaaatcgtcttcgtaaagttctgttgtaggttcatcaaagataaatattttttaagttattttgtgttgctcaataatttcgatatcggacatggtttttacctcattgctattattacgcgacagtagtaaatgtattcacttttctaaaggaagaatagtaacgtcaagattaaaataggtttttaaaaaatctttataattttcacgtgtgacagcgaattgctcttttttatatcttttagtaagggtaaggtgatgataagacatcgtagctcgaccaaaattttgtggttttgtaatcatgagttgctttacaaatatagattcaggatgtgaggtattgtagttaatcattttatcaaaatcatgaatatcacgagaaataaactctgctttataacgtgttacccacgttgtttcttccagtttttgaagaagatacgtcgtaggggtttcaaaaatggcacgaaattgacctgtcttttcaaacacaatttgtgtcgcttcaattgaagttattgggagtgcttgtaatggtaaatcgccaaatcccacatcagcaatatagtaaccattgttaataagaacaactagtgataaatgagagcctttagggctgtagttgccattaggctgatgaacggttgctgacattcgaaacactttaaaacctttagcttctaagtagctaccgaagaagtgattcatttcatagcaaaacccaccacgatgttgatatataaatttattaaataaataatctaaatcaactgaaatcttttctttattttgaacactaatattttcaaaaggaacggttagcataaagcgttccatataatagttaagtgcatctaaagtaggttgaggataacgttgagactcaatatttaaataatcttcaattgctttaatatccatagtttctcctccttaatcaatatgtatccaaaatataaaatagagcaaacgtgtgttcttcaatgaacacacgttggtgattatagttcttgtttcttaaaaatagatagtgatgaaaaataagaaatgacaaaaataataacaccaagcaatgcataactaccagttgctactaaaacgagtgggtttgaagcgattttacttattgaacctgcttttatgagtattggcataacagcaaagaaccacatggataaaaataatgcaacagcaacaactgctgtagtaagcataatgacatttgaattctcaggaccaaatttaaatgtgagtggaaacattaatgcatacgtacaagccatcccaatacctatgaatgctgaaaataatgtaaccataatatcttgagtcacgataagacaaatgatggcgccaattatcaaaccaagtaaaatgagtaaaccataaaaggcaaagtatgcttttacataagtatgtctatgtgtaggaagggtagacacatagtacatccatttagaatctttttcacgttttaagttatctgatacgggagataataacatgaccattagcatgaaacaacacatcattggactaaaaaatgcaaacacaatacttaatacgataccaataattaaataggttatgagcgattttttagaagcataaaaactactaagtataagtcctttcattatttatcacctcgcataattaattttgtagcatcatcaatactttgaagcgggcgtgcttgttcaaagtgttgacgttgcttgactaacgtttgacgttgaccatgacgtattcgtgaagcaatgattacctcttgaggtaagtctaaaggggaagtttcatctgtttcgataatgccataatcagttagtaatatatgtttgtcttcttgtaaaagaatatgaccatcgcgcataaaaataagttttgtagcaagttgttccatatcctctgaaatatgagatgaaagtaaaataccatgcccttttgatacataatcttcgagaatttctaacacttcttctcgtcctgaaacatccataccagctgttgcttcatctaagattaataattttgtctcatgagaaagtgcgatggctaatgctgctttcatgcgcatccctctagaaaaagtagaaatttgattatttttaggtaattcaaatgattgaataagattgaaaaattgatcactattccaatgtttaaaaatatttaaaaatactttatcaatctctgttattgtcaatttattcggtacacgtaaatcatcaaaaactacacccacgtgttctttataatctttatctttttcggaaataatttgattgaaaaaagaaatctctcctgaatctttaaatcgattacccactaatgtgttaataagtgtggatttacctgatccatttttaccaattaagccaatgacctcacctggatttaaagtaaatgaaatatcatttaattcgaaatttgaattcttatacgatttattaagttgttgtacttgaagtaaatgtgtcatctaatgatcctttctttatagaaatgaaaactatgaatgataaaatttatatgtttttaataaatgactaaatccattataaataaacaaaatgattaaaataaagatccctaatgtttgggaatggccagtttctaatgaataaaagcctaaaaatattgcaccaatcataattaaagataggttaatatagaatgttttgaacaaggagttaaagtaaatatgtcgttctccttcatctaaaatattaattaatttctcagcataatttttttctcctaatttgggatagcgagaatcaaatttacgataaaataatcctgtaattaccgaggaaataatcgttgtcataaaaggaagtaatgcccaactactagcactagaatttccatttcctaagacaatgataaaaagagcaataaagctaattgttaattctagataataaataaatgaattttgcatatatgctaaattagctttcttatcatatgaatccgcctcatcttcatcaatatgtgtttcggataaacgtttgtaatgaacggcctttttttgaatcataattaaatacatacttaagactaggataagtgccacacagattaatgagattaaaatgacatttgaatgtgtagcataatgataatttccaaagaagtgaaagctatggttgtagtcaatgaataaagctatacatcctccaatcagtccgccaattaacaaagtgattataaaacgacctattttcataaatcttcctcctcaattataaagatagattcaacaggttcattaaaaatacgagctatttttatagcagttaaaatagaaggtgtaaagtcatttctttcaatgagagatacagtttgacgtgagatgcctgcttttttagcaagttgcgtttgattataaccttctcttgctcgtaattctttcaatcgatttcgcaatcatcatcatctcctcacaatcagtgtatattatcatagtcattttgacaaatatatttgtcaaaaagtatctaaagtaaattatgggtaagactaacgattgtctgatgttagacatccggatgtctaaagcgtcttactatttaatcttatccactgtgtaatgtcttcaagattataaagcttgataatatcttgatatatatcgtctaaatttatattagaaagtgtagaaatcaatgtatgttcaatatgatttaaagctatactgatgttacattgttgtgctttgtgtcctgctttttctcctaaaaagttggtaagtaaatgttgacttgagaagatattgccacgaccttcaatagctaaaaagacatcgtaaaaagtaatatctttgagtttttttctaagtgtaaatcctccatttttaccagttgttgaatataccaaattttcttttactaatgcttttactattttttttaagtaagaatcagaaactttaagtcgcttgcttaaagcggtagatgtcattactgactgacgagggagttggtttaaaattaataagacatatattgcttgttcccaaccggtagataatttcatatataagcctcctatcaaacctattatataatatttttatattatatttaaaaaataaagtagttcctatataattgtatttaaagacaaaatatatctcaattatctttaattaaaaatagggagacgacagcagtgaaaaaacatttaaatacttcaataacattttatatgtccattctttttacgactatttttatgggatcatcttttccaactggcaaatatttaatttcaaatgaacatgttccacctatgcttcttggtggatggcgatttgttatcgcaggatgtatgatgttaatccttacatttatgagaaatggggaaaggggcattctacccacaagtaaagggaatagttataaaggatttatattagtgttcgttattggatttttacaaacagcagggacgatgggattattaaattttgcaatggcatttggcgtgtcttcttctatatcatctattctattatttacgaacccgctatggctggcctttttagcacattttattttagatgaaaggttaacaaaaattaaaattacttcacttatacttggtgtgtttggagtaggattatgtctcggattagatgaaatattatttggatgggggacgctttttgcactagctggttcattatgttggtcaatcaatacaatagtgacaaaaaaggtagtgtttgataaagggccctgggttttaacaggatggcaactattattcggtggtatgtttatgctgataatgagtctcgttttaaaagaacattatacacttagttcgcttaatcattggggatggatatggttcttttggcttattattccagcttctgtaggttcatttggattatggttttatagcttaagccaacgaggggcaactacggcgagtagtttcttatttttagtaccactattttcgacactattttcaattataggattaagagagcccttcacgcttcatttaattttaggaggtttatgcgttgttgtggcattaatgttaattcatcgtcaaccgaggaaaaatgttttataaaatacaatattcaatacattgaatataaatacatatattaatagaaattagattatataaaactttagttaagccttttgaaattgtcttacttttaacataatgaaaaaatatgaaaacttgtcattactatatttttgagaaataaaaaatttaaaaaaatctcttcacagagaatgtaattttgtgtagtatatctttcatatgatttttagagagaaaaaggaggaaacaataatgaaagataacagaatgatgttcttcatatttatgttaggtacatttacagttggaatggcagaatatgttgttactggtttattaactcaaattgcaagcgatatgaaagtgcctatttcgagtgcagggttattaattagtgtgtatgcaattagtgttgcattaatcggtccattaatgcgtgtatttactttaaaagtgcgcgcacaacgtttactcccagtattgatggccatttttattataagtaatataatagggatgttagcaccgaattttccaatattactgttatctcgattattgtcagcctctatgcacgcgcctttctttggcgtatgtatgagtgtggcggcagctgttgcgcctcgtggtaaaaaaccacaagcgattgctctcgttcaagccggattaacaattgcagtgatgattggcgtgccattcggttcatttttaggtggatttgcgaattggcgctttgtctttggcgtcatgattttgttagctgtcattactatgttaggaatgatgaagtttgtacctcatgttgtattgagtacagaaactagtgtgaaaaaagaattaaaagtatttaaaaatccacatatcttaattgtaatggcaattattgtctttggttattcaggcgtattcacaacttatacgtttatggaaccaatgattcataaatatgcaccatttggaattgttggtttaactgtatgtttatttatgtttggccttggcggtgtggttggtaacttgcttacaggtaatgtaccagaacataaacttacacagtacttgttctatacctttgtgttattgtttataacgattgttttatttgtaacagcagtgcatagtgcgattttagcaattattatttgtttcttatttggtttcggcactttcggtacaacgcctctattaaatagtaaagtgattttaagtgcacatgaggcaccgttacttgcaagtacacttgcagcttcagtctttaatattgcaaactttttaggtgccattgtggggtcaatactattatcaatgggattcccatatcttacgattacatttgtatcaggcgggatcattatcttaggaattataattaatacaattaatcatttgtatgaaaaaaagtatgttacatttgatcattaatcaaaagcgttctaaattgagtgaattcaatttagaacgcttttttataaaatgtaaaatgaatgttaaataattaccttaaaattgacaacttgaggaatataagatacgtcgtgttgcgtcatataatcaattaatacttgtgcgccttcctcttgaatatctttaacgactggcgcttctgcaaacattttataatctccgcctccaactgcacgatagttgttcacacatatggtatacgtttttgtgtcttctaaaggtgaagcgccgactttaatatctgaaacacgttgtcctacaggtgcaccagcatgaatggtataagagattcctccatacatatcataattaaaatgttgaggttttggagataaaaatgtgtcactgactgtgatttcattattgtcatttacactaaaataacttgctgatttttctaaagcgtctttaattcctttgccattaagttctaaaacttgaaatgtattaggaaaaggatagttattaatgatatctcgcattgtgacttgttgattaaagcctttagctgaatcaaatagcgcagtacttgctatatctgcaccacctttttctaacaaaatataatttatcagattaataagtgaatgagggtgtgttcgagcttcgaactgatgagtgactagcattggttctgataatgttgtaatgtccgtatcaagccaatcttcaagttcatttaaaagtgaatgatcgttgttagataatgttaatgaaagatgagaaggcacagatacaagagtgctctgtttatctgtaattcgatgttcatgatctaatgttaatgtcaccttaccaaattctgtacctcgtgtacctggttggataatggcggtgtcattttttatcattgcaatatcacgatgttggtgtcctgttataagcacgtcaatatctttatggaaacgttctagtatatcagatccttcattttctccagttaattcttcagtaggtgtattagtatcaagacttttttcaaaaccgccgtgataagacacaacgacaacatctgattttttacgaacgtctggtaaaatacattttaatgtctcaactgcactgttgaacgttaatcctttaatatgggcaggttgttcccaatttggaatgaattgtgttgttaatccaatgacgccaatagttatatcgccacgtttaaaataatttacgccttgaccagtcaaaggtgcgttattgtgatcaaaaatatttgcacacaagatagggtgatgaagatggtttaaagtattttgtaaataaggtaatccataattaaattcatgattacctaatgtaccaaagtcaaaattaagacgattataaatatcagtaagaggttgacttgattgttcttcagttgctaggtaatggcataaaggagaaccttgtaaaaaatcaccattatcaattttaaaactatagtcatcgtgttgacgttcttgttcgatcagttgatttacttttaataatcccataggaagattttggtttctttttgaaaagtcagtgggaaaaatgtagccatgtatatcacttacgatataaaaagagagttgtgtcataggtcatttcctttcataaataaagagataaaaagggaagtagtttattgaacgccacatacctttattatctcttacgtgttgtattactactataaattattgaattgaacctgtagcaagcgttttactaccttgttttaaacggatattcacacccgaaataggttcagatgttttagctgtaaaagttaacgttgcgttaccttgatcatcagtggttacactttgttcttgactatagcctaccgtatcataagtttgcccatcttgagaaaaacgtgcaagttgtctaccaccatcttgataaatacctaattttaaatgatcaatagttgtatttttagccatgtttgttaattcaacttgaatattaaatggttgattcactgatacattatctggtaaatggaattgaacattattgctagaaatcattgaattagaagtagttgtatcttgggaagactgtgatgtattcgtatcctcttgtgaatgattgttttcagttgtattgtcttctgtactattcgctttgttattatcattatggctaccatgatttctatgtttactatttagttgtgatgatgtactgccataactacctagtttaaatgttgaacggtcataccatttataaccagttggaggttgtgaccatggttctttttcaggttcagttgaatgttgtggttgttcaaagttaagtaatggtgttggttgatctaacttaatacctgtttcttttaaattcggtgtatgatcttgttttccaaaccaagttgtaatatttttaagtaatttactattatcttgttctttaaacccatcatacgttttcttagttcttccattatcttcacgtacatatttaggtgtactatcttcgactaatgatgaatctccaatgaaggctgcttttcctttgcctacttttgagatagcaacataaggaccctctgcgataccaccgccattgtaaataccttgatcgactgcatgagaccaacgttgtttttgagacaaatggtctggtaagaagataataccttttgcttttgtaggatctgtaatggcaagagttgaaccagcatgcattgatacagaatgtacaccttcagtaataccaaagctgtcactggatgacacaatattttgagtgtttaaatcacctaaagcgttgtaacggaaacgtacaccgaagtgttcagaaagccaatctgaacttttaacatttcgcatagctttagaatgtttttcctcatctgttaaatctttggtgatatcttgatatgcaccacgacgataaccattcatcacttctgaagaatcgaaacgatttaagtttctgtctgcattataatgatcagcgataaagatgatattgccacctttttcaacaaaattaagcatagcttgttgttctctctttttaaaaggaatattggcttctggaagaacgagaatattgataccacgtagtgtattaggtgtaatattagattctccatcgatttgtttcacagtatatccttgttgacgcattgaatcagcataatcggaaaagccaccgtcaatgacccaatcagcagctcctgccgtttggccgtgtgaagcgtcaaaagcgacagtttgagtggtagtttgatttggtgcagcgtgactgattggcgttgaagataatgtaattgctgaagctaaaatagtactacttaatacttttatccatttcatatttttatctcccaaatatattttttaattgatttataaaaaaagtataataaaaaaatgagtcgataatagattgtttagttaatatttaaataaattttacaattctttaacattgtaaaacaattctataaaaaattaacacataataaatattattttggttaatattgtgctactcttaatattgtcaaatgaaatgcgttgacaaattacataaatgtatacatagcgaacgggggcaataggttatgaagcaattgaaataccttttagtattagcgctatcagttattatttttgcagcagcatgtggaaataatagctcgttagacaataataagagtagtaattcggatggtggatcaggttcaagtaaagatggctatacacctaaagaattaactgtacaattcgtaccatcacaaaatgcagatacacttgaagcaaaagcaaaaccgcttgaaaaattattatctaagaaattaggtatcccagtaaaagtgtctgtatcaacaaattacaatacaattgttgaagcaatgaaatctaaaaaagtagatgttggtttcttaccaccaactgcatacactttagcacatgatcaaaaagcagctgatttattattacaagcacaacgttatggtgtgaatgaagatggttctaataataaaaaacttgtaaaagattataaatcagaaatcttagttaaaaagaattcaggtattaatagcttaaaagatttaaaaggtaaaaaaatcgcattacaagatgtaacttcaacagcaggttacacattcccaatttcaacaattaaaaaagatactggtattgacgctactaaagatatgaaaatcgtaaacatgaaaggtcatgaccaagctgttatttcattattaaatggcgatgttgacgctgcagctgtattccaagatgcacgtaacattgttaaaaaagatcaacccaacgtatttaaagatactaaaattcttaaactaacaaaaccaattcctaacgatacgatttcagttcgtcctgatatgaacaaagacttccaagataaacttaaaaaagcatttaaagacatctctaaaacaaaagaaggacataaaattattagtgaagtatactctcacgaaggctatacagatgctaaagactcagacttcgatatcgtaagaaaatacgaaaaagaagttcaaaatatgaaataattttcacatagacagaactaaataagtgataaagagaagaggctagggcaattgagtcatataagaaatgcatatatcatttcttatgatcttgtcccgacctctttctctgtattaaaaagaagggtgtaaacatacatgagtcagatagagtttaaaaatgtgagtaagatttatcctaatggtcatgtggggttaaaagatatcaatttaaacatcgaaaaaggtgactttgctgttatcgtaggtttatcaggtgcggggaaatctactttattaagatctgtcaatcgtctacatgatattacttcgggagatattacaattgaaggtaaatcgattactaaagctaaaggtaaagaattattaatgatgcgtcgtaatataggaatgattttccaacattttaatttagtcaaacgatctactgtgttgagaaatgtattaagtggtcgtgtcggttatcatccaacttggaaaatggtattaggattatttccaaaagaagacaaaattaaagcaatggatgcgttagaacgtgtaaatattttggataaatatgaccaacgttcagatgaactgtctggaggtcaacagcaacgtatttcaattgcacgtgccttagcgcaagagccagcgattattttagcagatgagcctgttgcatctttagacccactcactactaaacaagttatggatgacttgaaaaaaatcaatgaagaattaggtattaccattttaattaacctacactttgttgatttagcattagaatatggaacacgtattattggtttacgtgcaggagaactggtttatgatggtccggcaagtgaagcgaatgaagatgtatttaatgaaatttatggccgtaaacttaatgacgatgagaagctaggggtggagtaatatggcaacacctactacaagtaaatatgatcaatatttaaataaaaaattctctttcaaaactagtttaactctatttttagtgattgcgctcgtagtgtggagttttttatatacgggctttagctttagtgacttaatggtaggtattccacaaatcggttctttctttggacaaatggttccaccagattggagttacttaagtaccattacaaaacctatgttagacacaattcgcatggcgattgtaggaacattcttaggatccatcgtatcaattccagttgcattgctctgtgcaagtaatattgtaaaaacaaaatggattacggttccatcacgttttattttaaatattgtacgtaccattcctgatttattattagctgctgtctttgttgcagtttttggtatcggacaaattccaggggtattggcattatttattttaaccatttgtgttattgcgaaattattctatgaatcgcttgaaacaattgatccaggtccaatggaagcgatgacggcagtaggtgcaaataaaacaaaatggattatgtttggagtagttccacaaacaatgtctacatttttatcttatgtattatttgcatttgagattaatattcgtgcctcagcagttcttggattagtaggtgctggtggtatcggtttattctacgattcaactttaggattattccaatatccaaaaacagcgatgattattctgttcactttagtcattgttgtcattattgactatgtcagctcgaaagtgagggaaaaactcgcatgacacaagaacagcatcagttagaaaagaaatatccagtgagatcaaaggaacacaaacaaagaatgattaaacattggcttattgccattgttgttttagctatcattgtttggggttttgcaggtatgcctgctttagaattaaaatctaaatcaattgaaattcttaaatctatttttaatggattattccaccctgattgggattacgtttatattccagctggagaagacttacttcgtggtttacttgaaacgtttgccattgctgttattggtacatttatcgcagcagtgatttgcattccattcgcatttttaggtgcacgtaacttagtaaaagttcgaccagtcacagggattactaaattcattcttagtgtgattcgtgtattccctgaaattgttatggcgttaattttcataaaagcagtaggtcctggttcattttcaggggtacttgcgttagggattcactcagtagggatgttaggtaaattatttatagaggatattgaaagtttaaacttctcttcagccgaggctttaaaagcaagtggtgcgaataaaactaaaacacttgtatttgcggtgattcctcaaattttaccttcattcttatcccttattttatatcgttttgaattaaacttacgttcagcatctattttaggtttaatcggtgctggtggtattggtacaccacttatctttgcacttcaaacacgttcatgggatcgagtagggattatcttaatcggcttagtgattatggtagccattgttgactttatctcaggagctattcgtaaacgtattgtgtaatagaaaatataatttgaacatttttataaacaaatagagctattgccagaacttagaaaactggacaatagctcttttataatgcatgaaagaaatgttgttacagtattagtaacagatacttagaaaaatacagttaatgttttttaggaataacgcgtctaaagctaatacttctaaggttagtataagagtgaatatgctaaaatcattatattttgaagtattagtgtcatattttttagtaaggggtgttactaaagaatatgtaacgttatttaaggattgtgaatgatgataactaagtgtaggttctgtttttaaataatgcggtggttcattgatgtgtgattcgatacataagtcgtgttgtcagagtaacgtgttgttttaatagcatttaatttagtatcatggagttgaatcgtcgttgttcgctgtttcattaagttctgtttttcaacataactattaaaatcgttgtcattattttctagggtgtctttacttcatccattttcctctacaagactattgaaaccgatacttgttttcagatagatttcactgttgggctgaaacatgataaaaacatgtgtgttgattctaacggatgacgggaatgtgattcatgttatagttaataccctgatttatgttgtaatcatttctaggtgtaatgagtcatttgttttggtcatgattaattagtattgttctttgaagcaataagctgatgaggtatatgataatgatattgttaatcaatattctgctaggatgtgaaaaaatgaatgaagatgctataagtgttgtaccgaatacctatttaaagtgatgtatagtcaaagctagttagttcttagtaatgatcattctatatacataaagataatgattttatttttcaaaaataaccataactatgtacatttataaactaacatatttataaaaaaacaaccttaatattccctatcatctatatgacagttttgtcatacacttaaaagttgataggataaatcgctattaaataaaactatatgatgacattgaaaggatgttgaatatgaattttcaaaatgtagtagcagatgatttagaaaggttaattcaattagaaaatgaagggtttactaaagaagaagcagcaacaactcaagctttaaaacagcgtattgaaatcattccggatacgtttattgttgcagaagaaaacaatcaaatcgttggctatattaatggtccagctatttcgaataagtgtattacagatgatttatttgcatcgattagacccaactctaaaatgggtggttatttaagtgtactcggtttagttgtagcgaaagattttcaacatcaaggcattgcaggacaactgttaaatgattttgagaatatagcaaggcaacatgcacgtttcggagtcactctcacttgtcgtgatactttagtaagtttttatgaatcgtatggatatattaataaaggattatcagattctaatcatgcaaatgtagcttggtataatttagtaaaagaattataaaaataggggtgatacattggaaacagtatggagggtgtttgtggggtgtacaagcatttattaaaacattgccaggcgttatagctactgaagcaggacgtgcgaatggaacgacgcagcgacttgatgatgaatatgatggctatgtagaatgcgttaaaacagtttttaatcctgacatcacttcaattcatgatttaatgcattatttatttgaaatcatagacccatacagtctgaataagcaaggcgtagataaaggacctaaatatcgtacaggtgtttatagtgaaaatgagaaccatcttaaagaagcacaacaatttattcaacaacgttcagatagagataaaatcgttgtggaagtacgtcctttagaaagttatattaaaagtgcagacgaacatcaagatagattagataaacatcctgaagatatctcgttatgtcacatctctaaaagtattttaaataaatacaactaaaaggaatgggacagcattcttatcgtattcgttgtcccatgtgcgctttattatttcttagaaaatgtatcgataagactaagtgcagctaaacctaataaatctaaagcatgttgtgcgccaaccttaccatgacctgcctcaaggcgtttatatactgcaacgcttaatacactaaacgtgacaagtgatcctaagcgagagatatttttatgcaagacacttgtggcaaacaaacccgatgcaatgaactcaatcacacctgctaatttcatagcacgttccgataatttaaaatcctgtgtaaatagttgtttagtataagggttaccagtaagtttacgttttgaagcggcatacaaatctttagcgagttttaaattggtagcataacgtaatatcattatctaaacgctcctttatattatattttttagttaaactaagtataaaagtcacgttaaaaaaagttaaataaaaacgttcagcataaatgtgtaatgcattcacgctgaacgtttttatttatatagttattgaattagtttttaccgaatgtatcagcaaaacttaaagcagctaagccaagtaaatctaaagcgtgttgtgcgccttctttaccgtgaccagcttcaaagtgtttgtaagctgcaacgcctaatacaccaaatgttgcaatagaacctaaacgagaaatatttttgtttaagaaacttgcagcaaataatgcagcagcagtagcttctactgtacctgctaatttaactgatttttctggtaaaccaaatacatttttaaatgtatcaatcatttcttggctaccttgtaattttggttttgatgaatcatataattcttttgcaagttttaaatttgcagcataacgtaagatcattaataagtactccttttttagttaaattattttattataaaataagtataatttttatactagaaattatatgattattggtaagtaaagtcaataaaaagcgttagataattatctttttataagaaagtgttaatcagtacactttagaaacgatattgaacgtgtcataataatactgttgtgacaaaatctatgaaaggagttatattatggaaacatcgatgaattataatcgaatgactacaattttctttatttcgggtattattgttatggcaagtttatatactgctttaccccttacttctgtattcgcaaaagattttggcatttcaaatgctgttgcctctctaaatggtgtgatcttttcaattacgtattcactaagttgtctattttatggtacaatttctgaaaaatttggacgtattcgtacgattttatttggacttattggactcgtcatcatatgtttacttataggcttcattcattcgttcacactatttattattcttcgtgcaattcaaggtatatgcgcggcagctttttcacctgtatctattacttatgtcactgaaacgtattcaccagtgaaacgtgtgactgcgattagttttattagtacaagttttatgttatctggtgtcattggccaaaacttgagtgaaattgtagtacgttattctaattggcatatggtttattttatattaacgttactttacatcttcatagcagtacttatatataaatatattccagaaagtccagtgaaaaatcctcaactcaaactagtaggtttctttaaaaactttaaagattttaaagataataaaatagtcatattatgttattttatttctttatctttacttaccatgtttattagtatgtatacaatctttaatcattatattacttctgatattgtgggtggctcggaagcaacagccattaatgctaaactctttggtattattgggatgttactttcattattagcaggacgtattagtgatcgtacaggagttaaacatgttatcgtaggcgcattaattgtcagtatcgtttctcttattttaatgggcttcactacaaatgttattttattagtgatatggagtgtattatttgtaggaggtattgcgtttgcaattccatctactatttcaaaagtaggtatggttgtcaatcgaaatcaaggtttcttcttatctgttaatacctttattctgtttttaggaacagccattgcgccattattgatgattcttattcaaccattatctaattttacattacaatttataatgattgcggtcattggaatcatcgctcttatagtcgctttacttttaccacgtaggaaaaatgtaatacgatgacattgtggtatcaaaagcattcaaattcaaaatgagtttggatgctcattttttataagttgagttgtcaaattaagtgcaacaacttagaatttaaaagttcataggacatcttccaattaagacactttctaggtcgatggttaatagagatgcccactattcctttccattaaaaaatgaattaaacaacgtggagtaacctacttggctagatgtcttccatttataacttatgtagaagtagatggacatgttatgacaggacaaaactcataatctgcttctcaagtaggacgcgaagtcaaagcattattagactatttacagtttaaagatatatctaaaatgtcatgcaatgtagcaaaaatctcatctacactataattgtaatcattttctacccaacgtcttaagacctctatcatgccgctactataaaaatctgcaataatttcaggatgatgactgtgtttaatttttaaagcaagtggatcattttgactttttacgctatctaacattaattcacgacttacatgcgttagattgcgaaagacgtccgcttgacgagaagaggtcagtaaatgtttaaatactttcttatgttctccgataaaatagatgaattgttgaaaggattcttctgtagaaagaaaaggtcgagtatcttcatgatgaaattcagttgcgatatagtcaggtaaagagaatagaaggtcatatttatcttggaaataacgataaaatgtactacgattaatttctgcgatatcacaaattttttgaattgttatttcgtcaaaatgataatcttttaataatttaaatacagttgcgtttatatgtttgatcatacgcttttgattggcagtaggcataattcgaaaatgctcctattaatttttttctaggtcgaagtttgacttattaaaagtaaagtatcataaactttagaataattccaaatatacatctttaatatgataataaaaaagtgtgacgatagaatagttaatgttcttcgccacacttaattgtcaaataaagtgtcaatttaatatttatttagtgtcgatatcgtttaaccaatcatcaactttgtgatcatgattgtctacataatcttttgctacttgttcagggtttttacttttaacaaagatgtttttagctaaacgttcctcatctttttggtcccaatcttttgcaatacgtgttgcaatgtcatatgccgctggatgtttttctttaaaattatgattgaatactaaatcaatatgttgcttattatttccataaattttgtctggatctttaagcattttgacatctaattctttcgagaaccaatttggttccattgatgtgaaaagaataggttgttgttgttgatatgctttttgaatttttttgaattgttcctgatcggaacttttatctaggctatatttactcaaatcgtctctatctaattcatcattcgtttgttgcataacaccatttctgttatcagtaccttgaattgtccaatctacagatttaccaaaatctttatcatcttttaaatctttaattgaatcaatgttctgaacatatttaggtactgctaatccaacattaacatgatcaattaaatgtttgtcatcatataaagtaagtgtatctttaaatttatcataatatcttttatctgtttctggaaaaatacctgaagcatgaaatgcatcatcacttgcagacactgttgcatataatggtccacttgctggcacaggtgtagttgtaacatcataaccagctttctttaatacttccgcaatcacaagtgaacgtgcagttgaattatcacttgcaatataagggatttcaatcgttttgtctcctaattcgattttactttgtgtagaggagttggattgactattcccacaggcacttaaaactatggctagtgtgagtgtggctaatagtactaaaaattttgatacgcgtgatttaagtatcaatatctttcgcctccctgatcatcttttctattgtctgtatgactcgtttgatatttatcgtaaacatgttgattatgttcgcgggcataaagcatcaatgctttaaataatacatcctgctccgtattattatcagttaaatctttgtataggtgtgtggttttatcaaaataagttgtagtgtcatgctgttcttgtcgcttagaatgaaccgtttcaggtgtaccttcttcggtatataaagcttcgtaatcaacatcatcatatgcattataattattagaatgggtagcatagctgcgattttgatgttgataagatacatcttgtgtatcaacgaattctctataacgagggacctctgaatgtttgtaattagaagtagaagattcatgatgttcttctaatgctttaccttcaacatcaattttaggtaatataacacctaaccatttcggtaagtaccaagatgcattaccgaataatttagttaaagcaggaattaatgtcattctgacaataaaagcatcaaataatacaccaaatgcaagagaaagacccattgatttaattgcagtatcatcttggaagataaaggcaataaacacactgaacataattaatgcagcggcaacgataactggaccactttctttaatacctacgcgaatagagtgatcattatctccagttttgctgtattcttcatgaacacgtgtcattaagaataattcatagtcaatggctaatccgaataataaaccgattgtaataacaggtaaaaaggcaagtaatggacctgtattgtctacaccaaatagactactcatcacaccatcttgcatgactaaggttgtaaatccaagggttgccattaatgataagacaaatccaagtactgcttttaatggtacaaggatagatctaaatacaatcataagtaaaataaatgctagtataacgataacgctagcgaatactgggatagcatcattcagtttttctgacatatcgatattaatgacgctttgaccagaaatctcagtgtcataatgatatttatcttcggcatctttgtgataatctctcaattcatatacaagatctgtggtagatttagcgtttggaccttcatttggaataatcgtaaagatagcatagtgattattaccattcaattgtgctttagatactgtatctacattatctaaatcttctatatctctacgcatattacttaaatcattttcaattgatgttttacttccaccatctttagtattcactaacattacaatttgtccgttatagccttcaccaaaattatctgaaatcagttgatacgctttatgctcagaagaatcgtttggtttaagactgtcatcaggaataccaagacgcatgcctgtgattggaatgatagctagaataagaatcactaaactaataatcgttgcaagcacaggtttacctacaacgaatttagcccatggatgatgtttagggtctttatttttagtaggcttatttttaattttaatacttttatggaaaatactaattaatgcaggaagtaatgttaaggctgctaaaacagcgaataacacactaatagctgaagcaaatcccataattgctaagaaatcaatgcctactagtgataaaccacacactgccatcattactgtaataccagcaaagataacagcactacctgcagtacctactgctttaccaattgcttctaccgtggcagtacctgattttttaatttctttatatctaaatagaataaataaagaatagtcaatacctaccgctaagccaatcattacagctagtgttaatgtgaagtttggaatgtcaaacataaatgtaagtaatgaaatcataccgacacttgttgctaaaccaagaatcgcactaataattggcatacctgctgcaataagagagccaaatatgataagtaaaataatgaaagcaactacgatacctactatttcagaaaaaccaccaggttcagagcccattgacataccagttgttttttcaatttgaatgttgtgattatctttaatatcttgaagtgctttatttactatctttttagatgaatcttgcatacttgtttgagggacaacatagctgatattagcaatagctgtatcgccttcactattgacctgtcccgactcatatggattagaaatgttttgtatataatcatcatcttgtttaatattatctaaggcatcctttatgtcttttttcgttgttttatctttcaatccatcctctttatttgaatgaaagacaatcttcatggacgctttttcactgtcttgatgaaattctttactgattttatcattcgtatcaatggattttaatccattcattttgatatcactatcaaattttggtgaagtaactaatagaggcgcaatcactacaccaagtacgactaaccatataataatacttagccatttatgcttagcgataaatgtaccaagtttatataatagatttgccaatataatacctccttttattgttaaaatagcgttattagacaatgtacgttaatagaacgtattttataatttaacaagagtttgattatatgtgtaccattaaaaaatttaagacgttggaaaatgcaacattttattaaaattgttgtttttttatagaagaagtgaggaggagcataaaaaagagaaggataacattcatttaaaattcgttatccttctctttatgatatgtataaatttaagctacgaaatatccgataagacaaattgcaccaatgagtacaaataaaacgccaggtaaatatattttttctctaagatcaatatcttgtctatatgcgacgaagctactaatagagatgagtatgataccaactactagtaaaataatagaaagtataagcatcaactcagcctccttcatatcaaaattgatgaaaacggtgttctcttaattttattatattaggaacagacaaatttttatagcgatttattaatataatgtaaaaatgttatcatttttatagttatttattaataaaatttataataaatttacatttaataaaataattaaaaggagtagaaaatgaattctacaagaattgttttctactcctttgcttatataaatgatcttttcatctcattgacgtctaaatactttcattttttaaagaatagattaatgtcataaagttttgaataagagcagtgagatgatgatctgcccggtaaacgatagagatataacttgaaggtgggccttcttttaatgacttgccaataatattaggatgatagaataaggtgctttgacttacaagactcagataattagaatctttaataatggttaatatactactaatactatttgattccatatgaacatttaaatcaataaaattgttttttcgccaatcatcaatactttctcgtgttgaaccactactatgaataatgaaacgatacgcatttaaatcttctaatgaaatatctgtttttgaagccaaaggatgtcttttatccattgcgataacaagtggattttcttgaagacgtttcactttcaattctttttcattgaatcctttttctgaaataacgccgatatcaatctctctatcttttattttctttagtatcataggagcagtatctacaattaaattcatatcaatatttggataatcatgcatatatttttttaaagtggtaggaagaatactataaataggtgcatgacttgctccaacgcgtaaagtcccacgtttagattgtttgaattcttcaatcatatgtgttgtttcatcaattaaatttagcattttattagaattacgataaagtaagtctccagcatccgttaaattgaaacatttaccttttttaaaatataagggtgttccaagttcgttatttaaattttttagatgaaatgttacagttggttgcgttatccccagtttttcagcaacagcattttcattctgcaattcaacaaaatttttaaaaatcatcatttgttttgtattcataaattaattccccaaaatatataaattttttctattctattatttatattaaagaaagaattttgagtttacgttaatacattgtttaaagttagttaatgttgatacattataatggaatatacaatattatcagtagaggattgaataaaaattttgttacgctctcatgtattaaattaaaaattgagggtaataacaatgttgcttaacaaatcctacaacataaagcatttacatttaaggagagatttacatgtcagaaagactacttgtgatttctgatattcatggacatcgaaaagccctttccatacttttaaaacgagcaaaatataatcccaaaaaagatcaactcgtacttatgggggattacgtcaataatgggccggattcatttggaacattaaaattggttaaaaggttaaaacgacgtggtgcgcttgctttagcaggtaatcatgaaatgcgttggttaaatagtaaagataaaaagattaagcgttggcatccgttcttacgtgaattatctgctgttgaagtgattggtaattatatttttgcacatgcaggaatagataccaataaacctttgaataagcagattaaagaatatactactggacattattcacattcgcttaatcgtcagattcctaaaaataaatatttagttcatggtcatgtaccgaatgatcgctatggattaaagaaagacgagatttataaaaataaaaatgaattatctatagatacaggcgcaggacacaataagtttttatcgctgattgatttaacaggtcaatatcagtattcagtagaggtagcgaatattcgaaaaatgaatataaaacgcttaaaaatataatagttaatgatgtttaatctttgattaaaacgaataaataaaaatataataagacattcaagttttatgtaaaatgttatataatgaaatggaatatcactaaaaaagggtggcattaatgaataaaaatacgcaaaacaaaaatcgtaaaatgtcgaagctaagttcgtatttaaaagtgtcatgttcagctttaatattaagtagttcacttgtaggttacgggtttacgaaagatgcatttgcagcaacacaagatgcagaaacagcaacttctgaaactacaacacatgttcaaaaagatttacaagatgcaatgaataaagcgaaaaaagacattaagcaactaaaacatttaagtgcagttgagttaaaaagttataaagaagatattgaaagtgctaaaaatcagactgaaattaaaaatataatcaaagaagcgaaaaaagaaaataaagtaacagcaaaagaaaacacaacagacgtttcaaacaaggataatagcactgaatcatctagcactcaagatgcttcaacagaagaaaaggctacaacaagtaacgacacttctgatgataatacatctaatatatcaagtgaattagataacattgtatcagatctagatactttatctaataaagttgatagcggtcaacataaagatgcaacaacatcaaatgaatcttcgtcttctgaatcaaatacttctgaaaacacaactgatgaagtaacgaaagaggaacctactacggaagaatcaccaaaagaagtgccaacaacagagaaaccttcaaaccaaacaacctcttctaaatcggaaacttctattgttgataaattagatagtattaaaaatgatattgatagtgctaaaaaagacatcgaaagttcaaaagaaaacgattcaaatcaattaccaagtgatgaaaatagtacagaagaggaaacaactgaatcatctagcactcaagattctccaacaacagaagacacaacacattctaattccaaccatcatgtattagatggattagctaaattaaacgatactcataaagatcaagacttagatacagatggacgatatcatcaatttgataaagtgaatcgccaattatctgaagctgaaaaaattaatcaagctattgctaaaattgaaaatagtaaagatgatgccagtcatttatatatcaatcgtaaattagatcaattatctgatttacgtgataacattcaacatcaagctgatttagcaaaaaaagataaacaagctattgataatgacattgaaactgtacgtaaaaatatagagaataaccgtgatattatccttaatcgtttgcaacaagcgtctgacaaacaacgtgcagctgaagatatattaaacagtgtatttagtaaaaatgaagcgcaacacattttgaaaaatattaaaacaaaagagcagtctgacaaacaaattgcagatcagattatgaaacaaattgatggattaacttcaacaacaagtgatgacattttaaaatctatgttagaacaagctactaataaagaggatttattaaaaacaattttatctacacgtttaggccaaaatgaagcggccactattgcgaaacgattagtaaatgaccatttaacaaattcacaaattgttgatcgcttaaaacaagcatttaatcaacatgggcttgtgtctagtgatgatattttaaatgatattttagataaaacgtctaatcgtaaacaagccattgaaacaatgttagcaacaaaattaaaccaagcaaaagcgaatgttttagctgatattatttcaagagtacaatctgataaagcgaatgctttggatttagtgaaaagtacaattaacggtaaagccaatgacttattacaacttcaaaatagcttaggtcaagccaaaaatagattaaactatattcttgatccaattgtaaatcgaccatcattattagatcgtattacgggtaacacaagtggttccaatctcggttcaaatctattaggtaatggattggatttactaggtggtttaactggaagtcatttattaggcaatcttccttcaggtagtagtttgcttgatggattaacaaatggaaacagcttacttgacggtataagtgatattcctaatccaacacaaggcttatcattaggtcatttaggcgatgatggtttacttagcggtttatttaatagtgatggaaatttatcattacctgcaacaggtgaagccattaagaaaaactggattccgattgcagcagtgattgctattgcaggcggggcacttgtatggttcagtcgtcgtaaacatcacaaatctaataactaaaccaaataaataggagtaaataattaatgccattgaccattaattatttactctatttttatatgttgagttgttgcacttaaatggacaactcaacatatgtaaaagatgtatccaaagtatgaataataatcaatttactttacatcatcattgaatgtcatatgcattagacataaacttaaagtatgaaaaaacaatttgaaaatgactcaattgtaattatgacgtagtacatgttgaagtgattaagattaaaggggtggggggcatggaacacagtgaaggtgtatctcatacagtatctgataacaaagagaaaaaacggtttcgattaaaaatgcctggtgcatttacaatattgtttattttaaccattattgcagtgttagcaacttggattgtgccagcaggtgcgtattctaagctttcttatcatgcaagagcgcatgaatttaagattgttgatgcacataataaaacaacgacagtcccagggacacaagatgaacttgataaattaggcgtcaaaattgatgtgaatcaatttaaatcaggtgctatcaataaacccatatcaattcctggaacttacgagcgcttgaaacaaaatccagctggcctcgagcaaattacttcaagcatggtaaatgggaccattgaagctgtcgatgtcatggtatttattcttgtgcttggtggtttaataggagtcgtacaaacgagtgggtcttttgaatccggattattagcactaactaaaaaaactaagggtcatgaatttttactggtctttatggtatctatcttaatgattttaggtggaacattgtgtggtatagaggaagaagcagtcgctttctatccagtgcttgtacctatatttatagcgatgggttatgattccattatatgcgtaggatctattttccttgcaagttctattggtagtacattttcaacagttaatcctttttcagtggtaatcgcttctaatgctgcaggaacaacatttgtagatggattatattggcgtatcgctggactcgttgtagcagccatctttacgattggatacttatactggtatgcaaagcgtatcaagaaagatccaaaattatcatatacttatgaagataaagtgaagtttgaaagacaatggtcagtgattaagaataatagtgaagaaagtattttcaccttacgtaaaaaaattattttaatattatttatcttaccttttccaattatggtatggggcgtcatgactcagggatggtggttcccgattatggcatctatgtttttagcctttactattgtgattatgcttattgttgcattaggtaaggatggattaggtgagaaaaaagtggtcgatgcatttgttaatggtgcatcaagcttagtaggcgtatcattaatcattggtcttgcacgtggtattaataggattatgaatgatggactgatttcagatacagtgttaaatttttcatcatcactcgtaaaacatgcgaatggcccactgtttattcttgtattattgattatctttttcttcctaggatttattattccttcatcatcaggattggctgtacttgccatgccaatatttgcaccacttgctgatacagtaggtattcctcgatttgtgattgttacagcgtatcaatttggacaatatgcgatgctatttttagcaccaacaggattgattatggctacattacaaatgttggatatgaaatattcacattggtttaaatttgtatggccaattgtcgcttttgtatttatctttggcggcggcttattagtcgcccaagtattagtatattcataataaaaagccattgagtttcaaattttcgaaattcaatggcttttgttatgcacttatttaggttgaatatagtgtagagatgaggcagtatcggcatcaatttgacgataggatacaatacctaatccttttacatttgattctgaaataatgattgagccatcatcattgactttttcaacaaaagcaacgtgaccatataatgcacttgctccagattgacctgcttcaaatacaactgctgtatgatttttaggggtcgtacttacattataccctgcgtcttcagcgctattatcccagttatgtgcatcgccccattgaccgcctacatgtttatcaaattgttgaacacgttcgtacacataccaagtacattgaccatatggatatggtgaagaaacatctgaaattgaaaatggcttaaatgcacttcctgaaacatctgtgctattacttcctgttgatttcgaatatttatctaaatcaggcatgtgttttttatcaaaatcagttaaattgtaatgttcaattaagctatttaatttcgttgcatagtttggatcagtcgcataagtttggcttaaatgacgtgttgttgaacgataacttggtgcaatatttttccaagatgatttataaattgtaggattaccgtcaataccatgtttgattaaatcagcataatcttttaatgaagctttaagatttggatatttacggaaactagcattaatactaaaaatattattattactactagcttcaagtgtattgaagttaactgaagcacctttataactacctttcataccgaataaattgtagtttggtgcttgtgcaagagcgctattacctgaacttgattctaaaatagcctgtgcaatcataacagaagcataaatatcattatcttgcccaattttatgcgcatctttggcaatagatgtaataaattcacgtgttgctttattttctactactgcaatatctccattagtaacattgttcccatctaattgtggtacatcttggaataaacttatagcgcgtgtattactttgtttaaaatcattttcaaatgattgtggtgcttcttgtttatgttttagttgtttctccgttggcaattgcggattgtctttatttgtgtctagttggtcttgagttgttgatgtatctttttttgaatcttcactttgtgatgcttgagatgtgctgtcttttttagatgatgtatagtctttatgtgtttgtgttgctttatcactatatttatcaagaagtgcatctagtacatcctctgattgttgacgatctttattaggtgttgcttgctcttcttgagaggtttgagatgttgtattttttgttgtttgctgtgatgttgattgattgctattttcagatgtcgaggactcattagtattagaatcatttaaatctgaagctaattgattcaatgaatctaaggctttgcttacgctagaatcatcagttgaatgattgtcattactgttactatatttaaatgatgactcagacgattgatctgactgattattttctgttagtacctcagattgatttgatggtgtggtatgactatttgacttatcagatgagtcttgaggtgatggatcaattgttgtgtgttgatgtgatgattcagtacgatcttcatctgaagaagttgtattcgttgcatttttgtcatcattagtattagatgaagatgaatcactttcaatatgttcatatttagaaatatcatcatcaaaatggaataaagatgaaatcaaacttgttaaactaaagccattttcaaagtgactaggatctaaaaagtttgatgagaatgaatgatttgaaccattcatgttaaatacagataatggtgtatgatacgtgtcttcatctttagtatgagatgaacgattatttttcgaatgtgttgatgatggtttagaatgagaagcggcatcttcatttgaaactgtgtctgattgactttcttttgactgagagtcttgctttttattattatcagagctatcagaagttgaatcttctgaagatggagtttcattgctttcagtacgtgttgtttctgatgtagaagttgaatcctcattatttgattcagatgttttagtttgttttgtagtctcttcagcttgagcaacactagacgtaaatgttggtaaaaccagagttgtagttagcaaatatatcatgaatttttgcttcgacatcaataaacgctccttacttttgtataatatattttataaatccgtcttaagtcagacgatttctatcgtattttaacgtagcattagctttgtcgctaaaattattttctgctataatgcatgagtaccattttaattgttgacgtatatcaactaattatggcattcgtgataaaagtattatactaattctacgatataaaaaacaatgttttaaatcatattgatataaattcttaatatttcatttttaggagagtgaaaatgaagaacgcgtttaaattatttttgacagacttaaagcgtgtcgctaaaacacctgctgcttgggtaattctaggcggtttggcaattttaccttcattttacgcatggtttaatttatgggcaatgtgggatccatatagtaatacaggtcatattaaagtggcagttgtaaacgaagaccaaggcgataaaattcgaggtaagaaaattaatgtaggtaatacgctcgaagacacattgaagaacaatgataaatttgattggcaatttgtcagtcgggagaaagcagatcatgaaatacgaatgggtaaatattatgcaggaatttatatacctaagaaatttacacatcaaattacgggaacacttcgtaaacatccggaaaaagcagatattacatataaagtgaaccaaaaaattaatgctgtcgcccctaaaatgactgataccggttcgacaattattgttgatgaagccaataaacaatttaatactactgtaacgaaagcattattgaaagaagcaaataaagtaggtcttcaaattgaagacgaagtaccaactatcgataaaattaaaaatgcagtatatactgcccatcaatctttacctaaattgaataaaattgcagatagaattgtttatcttaatgatcatcaagatcagcttgatcaatatgcgaatcaattccgtgatttagataactataaagatgatattttaaatgctcaacaaaaattaaatgatgtcaatgcagcgattccttctttaaatcaaaaagcaaaactaattctcgcattgaatgaatatatgcctaacattcagaaattagtgaatgtagcagcagatgatattcctcagacattccctaaaattaatagaggggtagatattgcgagtcaaggattagacttagctaatcaacaacttaatgatgcgcaaggttatttaggtatggctaagcaacgtgttggtgattatcaagaggcaactaggcgagcacaagcagttaatggtaatgtgaataataatttacgacaacaaagtgcgacaactaatgacaacggtatgcctcaatatacgattcaaaaactaagtaatagttcgaataatgatcaattacctaatggtcagattctttcgaatgaagatgttaaatcaatgaatagtggacttgctgaagcattacttgcattatcttcaaatgctgataagcaagctaaggcatcacaatctgatgtaaaagcattaagagatataacgtatggtgtcattgcctctaatcgtccaacagaatataatgacatgcttcgaaatattaaaggacgtttagaaaacacttcaaaatacaatcaacaattgattgatgtattaaaagaattaaaacaacgtgaacatgtgaatttagcaccacaaattaaacgaatcgaaagtaccaataaccgtattaatgatacgttacgttctactaaccaattgattgatgcattatcaagtggtggtaaaggtagtgcggagtctattaatgtattaagaagcttgccagctttaaattctggtttaggtagttatagagattacattaaagataatttaaatcatcgtttacttgtagtttctaatgatattacaaaacaattaagtgaaggccaagttgtattatcagatgtgcaatctaaattaaatacgattaatcaagtgattcaagcaggtcaagatattgtaggtaatggtcaaactcgtattgcaacacttcaaagtgaattaccatcacttgaagcgggatatattgaagcaactcaaactgctaaaaattacttcccaacagtacgaaaaaatgtagcaaaagctgcagactttgtacgtaatgatttacctgatttagaacaacgtcttgcgaatgcaacagctactgttaatgctaacttaccaacattatttgataagtatgataatgcagtagatttattagatgagaatcaaccaaaagcaaaagaagctttagcgaatttagcgaactttgcacaaacaaaattacctggtatcgaaagagatttaaataaggctaatgatatattcaatcaattggacgatgacgatgcagtagataagcttgttaatagtctaaaaaatgatttgaaaaaacaagcagatgttatcgcaaacccaattaataagaaaactgtggatgttttcccagtcagagattatggttcagggatgacaccattctatacagcattatccatttgggtaggcgctttattattagtgagtttattaacagtgcataacaaacatgaagaattagcagatcagttaacgaaacggcaagaatatcttggtaaagggatgttctttatcttgatgggtgtattacaaaccctcattgttacaacaggtgacttattcttacttcatgcgcaagtagaatcaccattgctctttgtactcgttgcattatttggtgcaattgtgtttaataccattgtttatacttgtgtatctatattgggtaacccaggtaaagcggtagccatcattcttttagtattacaaattgcaggcggtggcggtaccttcccagtagttacactacctaagttcttccaaaacatttcaccttacttaccatttacgtacttaattgattgtttacgtgaagttgtaggtggtattgtaccagaaattttaattacaaaattaattatatttgggctcttcggtcttggtttcttcttaattggatttattgctaaaccattcttagatccaattatgactaaaattgcaaaacgtgtagaagaaagtaaagtaacagaatagaaaataaaatagcctgattgataatgaaaaagtcattatcagtcaggctattatttttaattagatttgttattagattcactactacgatgagtgtgactttcagtagaagactgcgtactttgttgcgatgaaggtttttcttctgtggaaggttgttcagctgatgattgctctgaagatggtttttcttctgtgctttgagatgtgggttgttttgacgtgttactttctgaacgatgttgtgattgtgacgtagttgatgattcacttgtttttggctgtgtagtctgaacagtagagtgacgttgcgtcgtttgttgttcttgtattgattgacttgttgactcagattgcgcagtggtaccattgtcagactgattagtttcattagattgaactgtatgactttcagtagtagtttcttttttatctttctttttagtagattgtgtttgatttgggtcagattggttagaatgagtggctgcaaaaaagactgagcatcctaatgccacaataagtaatataatgactatagttgctaatatttttttcaaatgatagtcctccatttttaattcatttctttagtttattataatcaaagttcaacaaataggtagtatgtatataacccaatcatattacattttatttacataattctatgatagatacatctaaagtacagtgaattaagataaagagtatgagataataatagtgaaataaaaatccattagagaaagaaggacaatcatgaataaaatagttaaatctatagcatcagttactttagcatttgggacaatgttaggcgtaagtacagctgttttaccaatcgaggatacagctcatgcagctacaaaaccatattatgtatataacgggtatgtagataaagacgcaaaatttgtaacaaataaacattttattaaagcagttaaatatggaaatgtaacaatgaatggaatcaaatttgaaaaagtgcatagtaataaaaaacttgaaaaatataaccaaacatttactggtgtaagtaaagatggcaaaaaagcgaataaagttcaatttagtgttaaaggggatctgacatataatcaattgaaaaaagcgtatggctcagattttaaaaaagtaaagggtactccaagtgataaaaaaagtggtattttcgaatatcaacctaagaaagatggattaattgtttcttttgttatcacacatggaagaacagtagaagtagatattggctatgaaggtgtcacaacaagtaaataaatgataaatacgagcggaattgagttcaattcccgctcttttttattattcaatgtgacataatactgcaaactcgagtttcattgtttgtgagccattctcattactaattgtaatatactggtttaaagtatcaatacgtttaatataagctgcaatagaatgaatcgtaccatttctaaaataactaatcatagcgagttgatgcgttgtatatttttcaattaatcgtctattcagaatattgaattgatcatccgacaaagagggcattgttattttattttgattttctataaaagcatttatgcgttcatactgttcaggcatcactgcaaaaggtgcccacttaatcatgccacgtccttgtgggatgttagtgtctaaatattctctaggaatgttgcgataatctgtttcatgtttgtattgatcaggaatcattaaaaccacctcgattatattatagaacatatgttcgagttcttgaagtgatttcttataatataaataaattttatatttaaaaattaaaataatgaatttatatatcataagaccacaagtttaacaaaggggaagtaaactcgtggcctagtattgttatgtaatataacattttgtgaaggagtgaataggactattactcctaattatagtataccacaattttataaaaaaatatttaaatagatgactaattactataaagattgtatagataagagtaatgaagtatgatatgagtagtttaaagagaaagaggaagacgcatatgaaaaagataacaaaagtatgtgtagctacgacaatagcgtttagtacactattaggtgctagcgtcacaggtgcacttgttcaacaaccgactgcccacgcagcaacgtcatcatattacaactatgatggttatgctggtcaaaatgcttcattcgtattagataaacattttaaaaatgcgattaaagctgaaaatgttaaatttaatggcattaaaattaaatcgacaacatctaataaatcggtattgaaatatgatcaatacttcagaaatgtatctaaagatggtaaaactgcctcgttattagatatggaagtcaaaggtcaactttcattaacacaacttaaaaaagtatatagtaaagagctacaaaaaattgataatggtaacaacaacacaacaggtatttattactatcaacctaaacaaaatggtatgacagtttggtttgatgttaataaaggtaaagtagatagagtcgtattaggctatagtacagtacaacaagcaatgaattaaatggatgattgaagtgaacgtattcgcttcaatcattttttatacacataggcgaataaatattaaatgattatataaagctatttcaagttgaaattttaaaatcctcttttaatcaataattaaaagattttattattggaaattaacatttaatgctacgatagaattatatacatgaaatgtatattttgaaccgctactccatgataatgacatatcaatataccatttacttgaaggaggaatacaaatgacaaaggggccaattcaagttaataatgaaatcggtacattaaaaacagtactcttaaaacgtccaggtaaagaattagaaaatttagtgcctgaccatttaagtggactattattcgatgatattccgtatttaaaagtggcgcaagaagagcatgatcaatttgcagaaacacttagaaatgaaggggtagaagtcgtttatctagaacaacttgctgctgaagcgattgaaaatgaagatgtaagacagcaattgattgatgatattttatcagaatctcaaaaaacaattttaggtcatgagaaagaaattaaagattatttttcaaagttatccaatcaagcactgattgaaaaagtaatggcaggtataagaaaagaagaaattcaacttgaaacaacgcatctcgttgaatatttagatgatcgttacccattttatttagatccaatgcctaatctatattttacacgtgatccacaagcaagtattggtagaggcatgtcgatcaatcgtatgtattggcgcgcaagacgtcgtgaatctatttttatgacatatattctaaaatatcatccacgttttaaagatgcagatataccggtatggcttgatcgtacatcaccgtttaacatcgaaggaggagacgagcttgtgctttctaaagatgtattagctatcggtatttcagaacgtacatcagctgaagccattgagcgactagcaagaaatatatttaaagacgactatactacatttaaaaaagtacttgcgattgaaatacccaatagtcgtacatttatgcatctagatactgtatttacaatgattgattatgacaaatttacagtgcatgcagctatttttaaagaagagaatcacatgaatatctttacaattgagcaagatgaaatgaaagatgatattaaaattacacactctagacagctacgagaaacgttagccaatgcattaggtgtagataacgtagaattgatacctactggcaatggagatgtcatagacggtgctagagaacagtggaacgatggatctaatacattatgtattcgcccaggcgttgtggtgacatacgatagaaactatgtctctaatcaattattacgtgacaaaggtattaaagtgattgaaattaaaggcagtgaattagtacgtggtcgcggaggtccaagatgtatgagtcaacctttatttagagaagatatataatgttttcacgtgaaacaagttataatcaaaaacgttagtcatttggctagcgtctttttatattaaaaaacattccattagtctacaaaaagtgtaaaatagatatcatacttataaattggaaggacgaaacaatatggcatttatgactattaattataaatcacctacgattgggatgaatcaatcgtttacagccatcgttccagaagacgatagcttttttaaacaacatgaacctgtaaaaccattaaaaatgttattactattacatggtttatcaagtgatgcgacatcgtatatgcgtttcacaagtatcgaacgttatgcagaagcacatcagttggcagtgattatgccgaatgcagatcacagtggttatgcaaatatggcttttggtcataactactatgactatatattagaaatttacaattatgcacatcaagtgttaccagtatctaaaaaaagagaagataattttattgcaggtcattcaatgggggggtacggaaccataaaatttgctttaactcaaagccatttattttctaaagcagcgccattgtcagcggtatttgatgtacaatcattactcgatattgagtggaatgactttgatcccaaagccattgccggtgaagctttaaaagttaaaggtacagagttagatacctatcacttagtggatgaagcggttgataaaggcgcaacacttccagaactctttattcaatgtggcacagaagacttcttatatgatgataatcaacgatttatgaaatatttagatgaaaaaggtatcaattataaatatgaagaaggacctggggaacatgattatgctttttgggacaaagcaattgaacgtaccattgaatggttagtagagaaataaaaaaatatccttttgtgatgatacgtcacaaagggatatttcgttttatttaatgatttcaatcgtaaatggaacaacaaaatcttcgcctttattcattgcaagaatagctaaaatagtatagacaaaaccagcaatacctacaacgaataaagttaagtaaccaatgaatactacagttaaaactaaactttcaaattagcgaatgtcatcggtcaagtcatcaagcatgttgatatatctgataagaatagataaccaaaaataagaaatagatactttttctatttcttatttttttaattcataaactaatttgagttattattttgagtattttaaaataatgacaagtattaattattttaggtttttcgtgaatataaaagaagctactctaaatcaataaggagcgtaagtttagtgtacagatattacataacctcggtcgttatttttctagtattttcactgatatgtggcatggcgcttgttgagaacaataatacaaaagtttccgttgtggcagtaggagataatttaattcatcctgttgtctatcatgatgcacaacattctgatggtacatttaattttaagccaatgtattctaacataaagaaagacatagctaggcctgatttagcttttgtaaaccaagagtctccgcttggtggggatgatattccattttcaggatttaaacgattcaacacacctagtcaagtagcaggtgacattgttgcaacagggttcgatgtgattaatggtgcaaataatcactccttagatcaaggagatcaagggattacaaatcatatacagacttgggaaaaatttgatcataacgtattgtttacaggaatatacaattcgaaaaaagaggcgaatcgtgtacataccatttctaaaaatggtgtgaaaatcagtgtattaagttatacatacggaacaaatgatatggtctcaaactatccatatacagtaaaaacgtttgacgaagcaactattaaacaggatatacgaaaagccaaaaaacaaagcgacgtcgtcatggtgtcggcacattggggaaatgaaaatcatcatacaccaaataaaacacagaaaaaatacgctcaattatttgcaaatgaaggtgtagacgtcgtcattggtacgcatccacatgtgattcaaccagtaaagtgggttaaagcaaaaaatcatcatcataaaacgttggtagcctattctttaggtaattttttaaatggacagtatagtggagatgaaaataatcaattgttaggaaggataaacttcgatgtagtaaaagaacctaaaggtgtacatttaaaaaatgttaaatggacaagcatggtcaatcattatgaacaatcacgtcctaccaacaaacaaacacgccaaaattttagaatttacaatctagatgattacacgccacaattagcgcataaacatggtttacaatctgattcagacagtgaatggaatatcaaacatttacaggatattacaaaagatgttatcgataataaatttttaaatgaaaaaagtttataaaaaagagcgactgtacatgtgtaaatgatacatacagtcgcttttgatttatctatataaaagcttttctgttatacagtttatttattttgatttgcaaaagctttggaaatatctcgcaatgtttgtggtgcatcatcccacttcatcgtcacttcagtgaagtgcatgtgttcttgatcttcgtttatttcatcgaagacagcctttaaatcttttgaagttttaacatcatggactttcacgttatctccaccaaatacgttgggtaatgctttgtaatcccacatgttgatatcattatagggctcttccataccatgaatgagacgttcaacagtataaccatcattattaattaagaacatcacaggtttaatatcttggcgaatcattgttgataattcttgaacagtcaattggaatgacccatcaccaattaataaaatattacgacggtgtggattagctaattgggaacctaatgtagctggtaatgtgtaaccaattgaaccccataaaggttgaccgataaatgacatgtttttaggtaaagctaaactgtaagccccaaagaaggatgacccttgttcagcgattaagacatcattaccaccaataaagtcttgcatcattttaaagtaagtgtcttgagttaacgtatcatcagttaattcatagtcatttgattctggttgttggtaaaaaggaaatgaagatttatttgtataatctatcgtatttaacgcttctaagaattcaggcaatgcagtttctgtatcaatcgtatcgtttaatttgaataggcgatggttaatcatgaccacttcgttaatatcaaattgatatgaaaagcctgcagtggctgaatcagttaatttggcaccaatatttaaaatagcatcgctatgattgacatagtctttaatgtcatctttagcaatttccccatcataaatacccatatagtgtgggttttcttcattaaatgcccctttacctaacgataattgaacaactggaatattcgttttattgacaaattgttctaattcatcatgtagatgaaaactattgatttcatgacctgcaataattaatggttgttgagctgaacgtaatttatcagccaccatatctatatattgagatacatcttgttgaggtgcgttttcaactttgaatggttgttcaacttcaatgtctgacatagccacatcaataggtaagtgaatgtgtactggacgacgttcttgaagcgctgcattgattactctagggatttcagttgttgcattttcaggcgtgatataggcttgtgctgttgtaatcggttcaaacatatgtcgataactatcaaagcgtccttcacctaaagagtgatgcacatatttgcctgccttttcaacagctcttgttggtgcgcctgtgatagcaatgaccgggacacgctcagcatatgagcctgcaataccattgactgcacttaattctccaacgccgaacgttgttacgagtacgcctagtccgttcatacgtgcgtaaccatcagctgtataagcaccatttagttcattcgttgttccaacccattcaacgccttcatgactgacgatgtcatctaaaaatgctaggttaaaatctcctggcacaccaaatattttattgactcctgcttcatgtactgcatccattaaatattgtcctacacgttgtttcatattcaattccacctttgtattgcttttgtttacatatataggataagcctggtaataaataaagtcaatattattgaccttttgatgaaaatcgttagaaaatttactataataattaataatgtctttgaaaaggaacgagtgaatatggatcgaaataaaaatgattatgagcacatgctattttatttcgcttataaaacgtttgtgacgactgcagatgaaattatcgaaaaatatggtatgagtcgacaacatcatcgctttttattttttattaataaattgcctggtattacgattaagcagttactaaacacgttagaaatatcaaagcaagggtctcacgcgacattgaagaagttaaaagaagaaggcttaatcattgaacaacaatctgaagaagatcgcagagtaaaacaattatttccaacacctaaaggaagtaaactagtagagaaattaaataaagcacaagataaattaatgcaacaaacgttccaaaaagttggaaaagattggtatgcgattatggaagaattatcaaattatcgagaaggatttcaagatattaaacatttaaaagatgaaaaagaatcttaaaaaagaagctgaacggatgtacatcgacagttcagcttcttttattgtagtaaatattaatttaattttaaaattaaataaaacaacaaaatatattattgattattttggaaatattagtattattaaactatatatttaataatactaaggggaaaacaatgaaaaataaaaaaactacatatttatcttatttaactaaaacgttcttgggattagcaatgacggctgcagggataggtgcctttggatttgcacaaaataatgcttatgcagctgaaacacatcaagtattgaattctagtacacagaaaaagaacatcacgaaaacaacgcactcacaagtttcaacgactaaaacttcattgtctaacacaaaaccaactattacatcaacacaagtacctaacacaaaacatactacaagtactaaatcagcagcagtgaaatcagctacatcaacaaagccgacagcaaagagagtaacgtcaaagtctactgcaccaattaaaaccacaaagccgacaacaaagagagtaacatcaaagtctactgcaccaactaaaaccacaaagccgacaacaaagaaagtaacatcaaagtctactgtaccaactaaaacaacaaaatcaacagcaaagaaagtaacgtcaaagtctactacaccaactaaagcaacaaagccaacgacaaagagagtaacgtcaaagtctactacaccaactaaaacaccaaaaccaccaacaacgactaaaaccacaaagtcaacgacaaaaaaaataacaccaaaatcaactctaacaactaaaacaccagtaacttctaagaatacgaccttaaataagactcaatcaactattgttaaaaaaatagatgcacctaaaacattagtaactaaaacaccatcttcaacaacaacaaaactacaaataacacaaacatcaaaagcacctgtaatggtaacaccaccagtctataaattaggatctgtgaagccaacagactattatcgttcgatgacagatttactgaaggatacgcaagaaggaaaagattggacaaaagaaagcacgaatagacacagtaatgtccttatttttgcgcctcatggaggtaatattgagaagggaacgacagaattaacaaaggccattgcgaataaaggaaagtatgattattatgcatttaatggaactagaaataaaaataattcacaattacatgtaacatctactaattataatgatctggatttaattaatcgtaactataataaagatgtatctatttctgttcatggtgcaggacaatctcaagggaaaaatacagtgcttattgggggtagagatgaaaaattaattcaacttatctcaaaagagctaagtacgtttaaatttaatgtacaacgtagtttgggacacttagctggaatagacacaaataatgtagtgaattataataaaaaaggacaaggcgtgcaactagaattaacaccagatcttcgaaaatcatttttcagtaatggtgatgattcgtcaaaagcacgtaaaaatgaaaaaaattggtcatcaacaatggatcgttttgcgacagccataaataatacaattcgaaagtacatgatttaatatagaagaggttagagtaaagtagaacgttaagatatcatgtgttaacattctattttcctaaccttaatttatttatagaaagaaagtagtgtagaatgtaacatcacgttatcacgttatattgtaaggccatatttttatatcgtcattgatttaattgaataggcagtatttacatagttacttaataagtgtttcctttgcaataaattgtataatctatatatttataactttatagcattatacttctaatatatgaccttaatcattacttagtattgtttttaaagtttctaaatggaataggaatatttgtagaacgtgttttgagatttcatacgatttatttacacactcgttaaccattacgtatcacgtttttgataccctcgatttaaaaagtgttatttctattatgcttgtggtactaatacaaaccattgttatattatttgtgaaaggagtacgattaataaaatgattcacatactactcctcttagtcattgtcattatattgcaagtgctgatgagacattttcttaataaaatagagttagagtcaaagtataaaaatatgattacttatttaccatttggtttaggattgttttttgttcaaaatgtatattatgaacgtcagtatccacattgggaggtaccacttaaagaaaagttgaatttaaaatatatttatctttttactttcttagaatttgttgcgatatatatttgtttatttgtgatgaaaaattagatattattgtcaatacattctctaaaatgacataaatataacgcaatttgttcgattgactttaaaaataataccaaatgagtgtataatatatttagtctagacttgttttttgacaaaacaaatctaatgtacgctaaaaattaaaaggagtgacaataatgaaaaaacttttagttacaactattattggttttgtaggctatattgctttcaaaaaatatcaaagcaaagtaaacgaaatgccaaatattgaatattaatcatataaaccgagatatttctaagattgaaatatctcggttttttgtcttaatgtattgatataagcaacaactaattataattaaatcatttacagctaaaaatattactaagtaaaacaaaaaattaaagataatttagaaatgaactaatgatgtaaaaaagcactttagcagttttttacttgctaaagtgcttttttgatcataaaacaagacacgcttcaattatagagagcgtcttatctatgagctcaatactattgttgattttgattagacgtgacatcttgaccaaagaagtcgaagatatttttcgcactatctgtgttatcaatgttaccacggaatttatcagcacctgggccatatgcgtaagtatttacgtcttcaccagtatgaccatatgttgtccaaccagtatgagattcgtcattaattggtttttggatggcgtcttgtaatgttgttgttgcttctgcaatttttggatcatcttcatttttagctttatctttaacgtcttttagttctttcgctgcatctttaactttatctaattgttttttagggaagtcgacaccataaccttcattgatcactgtttcagggtctttacctttagcaatttgttcagtcatgtaactgccagaatgtttcattttatgaatagcatctggattccatacataatctttgcctttagcgatggataaaccaccagttgagtggtcagcagttgcgacaactaatgtatctttatgatttttcgcatagtcgatagcgttttggaatgctttatcgaagccgctcatttctgacataacaccagtgatatcattaggatgaccagatttatcaattgaagcgccttctaccattaagaagaatcctttatcatttttttctaatttagataatgcactctcttccatatctgctaataatggattttgttgtggtgcatcaatttgtaacggcatatttttctcagcgaataaacctaatacttggtcactttttgagttagctaagtcagttttattggttacatagtcgtaaccatctttttgaaatttctcagttaaatgaccattttctttaccgaagtacttagagcctccacctaagataacatctactttatgttggtcattaattttatcgttataaaattgttgtgcaatttcatcttttttatcacgatcatctacatgtgccgcatacacagctggagttgcatcagtgacttctgctgttgtcactaaacccgttgatttaccttgttctttagcatattctaatactgactttaaaggttttttatcattatctacagagattgaaccattatatgttttatgacctgtagcgaaagctgtgccacctgcagctgagtcagtgacattttctttaggatcgttaggattagtacggttagttccttttaaatatttatcaaaagcagtttgatctaattctttggtattaggattatctgcataataacggtaagctgaattataagaaggacccataccatctccaaccatgaaaatcacatttttaggatttttagtgttaccgatggccatgtaatcgccattttgaccttgttgatcttgagcaccttgtccagcaccagatgcgaatgacacatgtgttgtacctaatactgaagcagctagaattgaagttgctactgtggtttttccaaatttattgatgaaactcattattaaaaaagccccctaatatgtaaaatatagattacttacatctttatattaagaaactttatttgatttgaagtaagtatttagtaaactttagtttaaggtattgtaaaaaaatattaatttatcatattctatgatttgataaattaatttaatataaagaattgaaaatatatgttataatagtattaaataaaatagtttgatcttattaagagtaagtggagggaattggccctatgaaacttcagcaactgcgctttgcgtgaggtgctacatccaacaggattttcctgaaagataagaagatgtcgacaagcgcttcttatttaaggagggctattttatttacccaaattaaaaaaggtggtaaacatatgacaacattacaagaactatttaaagaattagatgattgggaacagcatagtcctaaaagttgggcaggaagtatgggaagaacagcaaaaatcaatgatatccaaagacaaattaaagaagcgatcaccatagaagatattagaaagtatattttaaataaagaagattaaaagtaaaagaagtatgggagtgagacagcgtattcaaagtgaattcgaatctcgctccttactttttatgaaacagtcaatctcgaacatattcaatttaaagaaaaagcgttaaaataaagttaaagaaattatgtcattaataaatatatagaggtgaatcaataatgatattcgtaatgttatctcctttactgataattgtatttatcgcattatctattatggaagaaagaaaacgtaagaaaaacactcaacataaagaaaatgaatttgagaaagaaaaaaataaaatgtctaatcctaatgacaataatgatcatgacgcaaaataaaggatgaaaaaaatgaaagtattgattgtcgaagatgatgtcgtcattgcagaaagtctaggaaatgaactctcacattggaactatgaagtgagtattgctaagcagtttggtaatattcttgaagaatttaaaactgcagaacctgaacttgtgctgttagatattaatttacctacatttaatggttatcattggtgccaagagatacgtaaagtatctaatgtcccaattattttcattagttcgcgtactgacaatatggatcaaattatggcaattcaaatggggggagatgactttattgaaaagccatttaatttgtcacttactatagcgaaaattcaagcattgctacgtagaacatatgatttaacggtttcaaataatgagatgactgttaaagggtgtaaactcgttgttgatgaagccacactatactacaacaatgactctgtacaactttcgtttactgaactacaaattttgaataaattatttcaaaatgaagggaaatatgtcaatcgtacagcaattattgaaaaatgttgggaatcagagaattttattgatgataatacgttagcagtaaatatgacacgcctacgtaaaaagctgcaatctatcggtattgttgatttcattgagacaaagaaaaatgtaggatataaggtgtaaatagtatgttaaaagcgtttataaaatcgatacgtcatcaaatgatgatagtagctttatttttattacttttcttggtgattttttttctttttaatttgcctttcaatgccttctttctaggtatggcaattattcttttcataatgattattttttggttgattcaacttagtggatttcaagaagcagtgtctttaaaagaagaagttgctgacttagaagatgaattacaacgtgtaaaaaatgaacaagctgcataccaagtcaacgttgagaactattttttaacatgggtgcatcaaatgaagacacctattaccgcttcaaaactccttctagaaagaaatgaagataatgtagtaaatcgtgtgcgtcaagaaattatacaaattgataactatacgagtcttgcactcagctatttaaaattgatgaatcaagaaacggatatgtccttttcaaaagtgaccattaacgatctcgttaaacctcttattatgaaatattcgattcaattcatcgatcaaaaaacaactattcattacacacgttgtgaagatgaagtactgactgatgttcaatggtgtacgatcatgatagaacaaattcttaacaatgctttgaaatatgcaagaggtaaagatatttggattacgtttaacaacgaaaatcatgtgctatctatacgagataacggtgtaggcattagtaaagccgatcttcccaaaattttcgataaagggtactcaggctataacggaagacttcatcaacattcaagtggcatcggattatttattgttaagcatatatcggcacatttacatcataaagtagaagtatcttcaacgctccatgaaggaactacatttgacatacatttcccagaaaataattaaactttcaataatgtaaggataactagtaacatttttaagaaatgattaatgttactggtttctttttgttttatgatagaagtaagtgataaattaaagagttcaatgaaaagaaaggaagcatggatatcatgttgttagacgtgaataatgtaaaaaaaatatttggaagaggcctgaatgctactaccgcattaaatggcatttcatttaatgtggataggggtgaatttgtagcgattatgggtgaatctggatctgggaagtccactttacttaatttaattgcaacttatgatagagctactgaaggtacgataacgattgacgcgcaaaatatacgtcaattgcgtaataaagaaatcgcttatttccgtcgagaccatttaggttttgtttttcaggattttaacattttaccgacgatgacaaataaagataatattttaatgccacttgtacttgcgaatcgctcacatcaaacgatgcgtcatcgtctttatcgcttaagttatcagttacatattgaaccacttcttaataaatatccttttgaaatatcaggaggcgaacaacaacgcgtggctatatgtcgagcactgattaatgaaccagatttgttactcgcagatgagcctacaggtgcacttgattccaaaacttctaaaacgattatggaactatttagagacattaataaaaatgagcaaaccattttaatggtgacacattcggctgtggatgcttcctatgccaaacgtattttattcattaaagatggccgtttatatcatgaaatttatcgtggggaggaactacaatcagagtttcaaaaacgtattgctgatagtttagcaatgcttcacgaaagtggtgattaaaatgacttttcgcttggtttggacgttagtcattcagaattttaagacacagcgtcatattataattccatttattctagtcatcagtacattatttggtattgaatttattttattatccttaaacatgaatacttcgcttcataagcatagtgatgttattccagtttttattagtataggaaatttttttatgtgtctatttggactcctttttattctttatgctaatcgttttattatgcgacgtcgtcaaaaagagctggccatgaatatgattttgggtatggaaaaaaagcattttaggttaatgctgtttatagaaggaatatatcaatatattatcattggatgtctgagtattataggtggttacttatttggtgcattaacttatatgtcgttaaatagaatattaggttatacgcatgtatctttaaaaaaatatccatttgatataagtgcaatgagatacaccttgttgatgttagcaataatgatgctatttttatttattgtcaacaatataaaaatcacttttcaaagtcctattaagttaatacaacaacaacatccaacggaaaaacaatggtccaaacctttactctatatcttattgattgttgggatcataactgttgttgacagttatatgattgccttaaaagatacactcattttggtttcactacgtaatatttttattgcccttattttagtgacaataggaacgtattgcttatttatatcattgagtgttttagtgatagattggcttcaaaagattccgagtgtttattatcgacctaaatatttttttactatttctggattacgttcaagaatgaattctaattctatcggtttggctagtttaaccatgctatgtacttttcttattgtgactctaggaatgagcgtcgctacatatcgtagtgtagaccaacgtgcgaatcatttaatgccaacacaatatcgtattgaattgagtggagatgtgcatcatagtactacgagcaaacataaagtacgtcagctagaaaatgagattaagagacatgctgatgttgatgctttcagggaatatacaagtggaagtgttgcagtcacttataagaagggttcatttgtaaagcgagataatgaaaacagtccattggatttaaatagtatatatttaattgtaatgaatcagaaagattacaatacaatcaatcatacgcacctgcgacttaaacataatgaaatgggaatattagcgaatcatttcatgtttcaaaaattagaccatatcaaattaatgaatcaaacatttaaaacaaatcagttaaaaggagattatttttcatttccagttccaggtggagtcacacttgttactcataatgtaaatcaacaacgtcaattgattcattattatcaaacaacagcaaatattaactcatacattgcttttaatcttaaaacaaaagatacacagtccatagatcatattaagtctaaattgatgaaacaatatgatattcaaattgataataaagatgaattaaataaggatatgtttgatatttatggtggtctcatttttgttggaactattgtttctttagtcttaatgattggtacatttacgatgatgtattacaaaaatattgctgagggatatgaagatcggaaaaactatcgaattatgcgtcaagtaggtttagaagaagaacggattagatctgttattcatgaccaagtagttattatttttactttacctattatagtatctatgatacatgtactatgtgcttctaaaatgatttatactttgcttggtattttagatgttaatgatataaaattattcttaacaacttatatcggtgtcttagtgtttgtaatgataatttatgctttgatgtatgtaatgacgtctcgtgtatattatcgtctcattcatcgttgatatattagtaaaaagaaattctcattcttatatataaatgagtgtaagactttaggcagtagggtataaggataaaaaaggaggcggaataatggcgaaacaatatgatgatgcaacaaatagaaatagtaacaataatattaaacgtactggggaacacgtccttacttggataggtgttgcgattcaagcattagttgcaattatgtttttaatgattaaaccctttattggtaatgctgattttaaagaacaaattattaatgaaacacaaaaacaaggcaatgaggtttctataacagaaataaataatggtatggatgcattaggtggtttatttaatttctttacatggggcgcgttcatcccattaattcttgcaattattggcggtattttaattaataaaaagcctaaacttgcaggtatcttattaattattgcaggtgttttagcaattgctacaaactggatcagtttaattttatggttaattgctggtattatgttacttgttcgtaaacctaagcatgatatgtatggcaatggtggttataatgatcattacaaaagagaccatcatgatgtaaatgcaaataataatgcattcattttgaatgaagaagaagaaagacaacaacaacgttatattaaagatcattattcaaataaagatcaagtagcggacaataataatgaaagagagcacgatacacacgtaaatgattcaaatgatgacgactatcgtgatcaacgttattcaaatcataaaacgaatcaacaaagtaatgattttattcaagatgaagcaagaaagcttcaagaagaaaaagataacgatccatacaaatattaataatatgatatataaaagcgatggtattcctaagttaataccatcgctttttacgttaatttctactatatggtttggataaaatatattagacattaaattaaatctaagtgttctcttagtgtagaacctttatactgatgtcgatataacccacgacgttgtaattcaggtacaatgagtgtaactacgtcgtttaaactatctggtaaagaaggtggcattaagttaaatccatctgcaacacctgcattaaaccagcgttccatttcatctacaatttcttttggcgtacctatgagtgtcagatgtccaccacccgcattaaggtaacttagcagttctctgacagtaggttgcttatcttgaataatttctaagatggtttcatatcgacccacgggaccgttaaactcttctaaggaaggtagtttaggcacgggagcatctaattcccactgactacagtcttgttgaatgaaaaaactgagttgctttaaagcggctttgataggaagtcgttgatcaagttctgctttctttttcaatgcttcttcatgtgtatgacctacataagtgactagtccaggaaagactttaatataacgttgatggcgacgttgtgccatttcactatctaagcgctcgcgataccgttttgcttgcttcatgttccaagaaacagaatatactgcatctgcatattttgtagctaatgcaataccttgtttagatgcacctgcttgcatggccacaggttttccctgaatgctacttggtgttgtcaatggtccatgaacttgaaaatatttgccattgtggtgaagcgggttgatattgcgattgatcattgtatgatgatgccggttgggtttgaaatcttcagtatgccaagaatcaaacaatccgttcatgacttgagcaaactcttcagccttcttatagcgttcatcatgattaggtagatggtccatgctgtgattttgagcttcggcatctgtcatggaagtgactaaattccatcccactcgtccaccactaatatgatctaaactaagtaactgacgtgctgcagtgaatggattagaaaatgtacttgaaatcgtaggaactaatccaacatgttgtgtgacttgggatatagcagttaagttaatcagtggatcaaaccaaaaacttggcatcgaagtatagctagggataaaagactgattatctgcgaaaaagactacgtctaacaaccctttttcagataactgagctaattcttgatagtattgaatatcaccgagacgttcaatacttgaattgggaagttgccaagcagcttgatgatgaccacatccatagatcaatacaccgagatgaagttgatgttgatgagtcaatttaatttctcactccaatgttcattttatttctattctaagataaggaagaccagtcctatattaattcatggttaaaccaccatcgacagtaatattttgaccagtcataccatttgctgcttcgctacttaaataagcaactatattagcaacatcttgtggggtagtcactttacgtaatggagtcgtctgtgcaattaaatcaaaaacgtctggtgtagtgacagcactagcatcagttgttttaagcaatcctcctgacactacattagcagtaataccatattgccctaattcggctgcaatattacgcgtgaatccaatcaacccagctttagctgttgtgtattcatgataaggtacaacgggatgttgatataaatttgtgccaatgcttacaatggcaccagaaccacgctctataaattgtggaatgacactttgagtaacattaaaagcgccttttagggtaccgtcaatttgttgttggtagtcttcccatgctaagtctttaaaggccttttgcgcattaggatcgaatttaaaattaactaatgcgttattgaccacaacgtcaatttttccaaaatgatgtgttgcctcattaactaaacgatcaacttcagcacgttgtgtgacatctgcttgaattgcgatagctttgtcaccaagctcctttgcaagtgcctcagccgcttcacgactttgattgtaattaatgatcacttcaaatccttgtgtagctaatgttttcacaatgaccgcacctaaaccacggctacttccagttactaatactgttctcgtcataaatatcgtgcctccatttacttcatttacagcaaaaaaatatgcaaccttcgcgttaggaaagttgcattaaaatagatctatcattattgagaacagtttgacacatctcaacaggtcatcttattttatacgacactttcctacgctagtataagctagttcaggttcaaagggtttgaggttacacctcatctcagttttaaaacacccctagtgcatatgatttaactatagtttcactttatgacttctattatcagaagtcaagcgcttccattaaagaatatattgattacttttttatttgaatataaaaataaaaatttatataatttatttttataataattttcaattatatgattgaaaatcagatataccgtggttaaaatagaagttacactaaataggtgctttataggataagtaataaacagtttaacgttgaatgaagatttaacgtttttattttttacaaataaaatattgaggagagcgacacgtattatgaattggctagcaattattttatttttagccgttgttatgggggtcagtctttatgcgttttggcgttcaagaaaaataaagactgatagtgcagatggctattttatgggaggcaatagtttaacaggatttacgattgcctcaacgattattatgactaatctatctacagaacaaattgtaggacagaatggtcaaagttatggtaagggtatggaagtgatggcttgggaagtcacagctgctgtagcagttgtcttacttgcatggatattcttaccaaaatatttaaggtacggtgtggataccatttctgaattacttgaaatgcgttatggtacctttactaaacgtttcgtttctatattatttattttcacttatgttgtatcatttttaccagttgtcttatactctggttcattagtatttaataaaatgtttaatattggaaaatacttaggagtaagtgatgcaacagcaacgattattattgcatttgtcattggtgcagtaggtgttatctatttatttatcggtggtttgtcactgagcgcatttagtgattcaatctatggtgtcggattaattataggtggtttgattattacaattttaggtttacatcatttaggtgatgggaattttgtaaaaggattcgaccacatgatccaacgtacgcctgaaaaactaaacgcttttggagccattgattcagatgttgttccatggccaacattattctttggtatgttctttaataatttattcttttggtgtgcgaaccaaatgattgtacaaaaagccttagctggtaagaatttaaaagaagcacaaaaaggtgcgatatatttaagtttattcaaggtatttggtcctatttttacagtgattcctggtgttattgcatataattatttcaatgggggtataacatctaatgataatgcttatcctgcattgattcaggcgattttacctgattggggctatggtctattcggagcagttatttttggagccatattaagttcatttgttggatcattaaacagtacaacaacactctttactttagacttttataaacctatttttggtaagcgtgcttcagatcaacatattgcacgtgtcggtcatatcgcgacagttgtgattggcattattgtagtaggtatatctccacttattgcccttttcccaagtggattatatgcgattgtgcaacagttcaatggtgtatatagtatgccagtacttgcattggtcttagttgcattttattctaagcacacatctaaactaggcgctaaagtagctttagttacacacattgtgttatatgctgcaattagttttatggtgccacaattaaattatctatatacttttagttttatgttctttattgatttagctattatacttgtctttaataaatttaaaccttccaatacgtttgacttaaatactaatcaagctaaagtggatcttacaccttggaaatatcgttatgttacaggcggtattattctaggtttagtagtacttgcttacattatcttttcaccacttgtacttgctaaataattatttataaataggtgtacgtttgaaaagagtagactttttcaacgtacaccttactttttatatttataaagaaaggaggataacacaatgcacaaaattggtttgataccttcaccgggtgtgtctcgtaaacacgtagaagctgttattccagatataaaagaacagctgaatcaacgtgtgaatgatcaacaagaatgggtatttcaactacacgttgatttaatgattggctcagctgaagatgtacatgaaagtattgataaagcggcaaaaatgaaagatcaacatgattgggattttgttgtatgtattacagatttaccaagtatttctggaaataaagtagtgattagtgattttaataatgataaacaagtagcgatgctatctttaccttcattaggttggatagacctacgacgaaaattaagagatagtttaacttctattattgaacaattgtattattcaacttcaagagtggctcccaagattcatcctcttatacatcctaaagcagtagaaccaaatgaagatgaaacgccaaagcaacgttatattcatcgatggtttattctcagttggatccaacttattttagggttaacacgggcaaatgaaccatggaaaaatatttttaatttcaaaaagattatttcagttgcttttgcaactgggacttatgtatcgattttctccatgccttgggaactgagtatacagtactccatagtaagatttattatacttatgcttattgctatcctaggtatgacaggctggttactctatgcacatcaattgattgaacgtaaaacagctaaatcacagcgtgtgtatcgctatatttataatttcactaccatatttacattatttattattacacttttaaattatattattttatatcttttattagcgataagtgtatcattgtttgttccaccaggtttatttaatcaatggactagcgcacatcctcattttacgtttataaattatgtaaaattagtatggtttgtatcttcactaggtttacttgctggggcaatggggtctactgtagagaatgaagaaaaaatccgtcagattacttattcgtatcgacaatatcatcgttataaagaagcagaacaagagaagaaagaaaaagaacaagctcaatcatcttctcatgatgcatcaaatcaacatgttgaagaaagtgcatccaataaacaaaataatgataaccaacaagatgaacataaaaaacaagatcatagagaggaggagacaacatgagtgaagaaaaaataattggtctcgttgtggcaccaggagtgacggagaaattagcacaaagtttaattaatgagatacccaatatattatcagaacaagataatcaccaacgtgactggaaagttgatctcgtggtggatcctcttactggttttgcggaaagtgtggaagaaatattcaaaaaaattcaagattatcataataaaagagaatgggattatgttgtaggaattacagacttacctatgttctatcatcaaaacgtacttgctttagatattaataaaaaaaatggcgctgcaatattttcgtatcctgcttttggatggcgtcctgtaaagaatcgttttaaacatgctatcgtaaccattattaatgaacttcattattctgaaagagagcatgtgggttatgatgacaataatagggttaagaaagaaatcaataaacaatttcctttttcacgtattgagaaaacagaagtacatttaaaagaaacaggaaataatcatttaagatatttatcaaattcacgtagtcttggaatgatacgacttgtcagtgggatgacctttgcgaataacccactgaatatgatggcaagtttaagtaatattgtagcgattgcttttacgacaggcgcattcggattgattttttcaaccatgtggaatatggggcttgatttttctgtatggcgattatttggaatttccgtcatggcaattttaggtatgctcgtttggataatggtctcccatggtctatgggaatctacaaaaaaagctaagcataaaagaattgtaatgttatataatttaacaacgatcatgactttattgatagccattgtgatatattatatgattttatatttattattcttaattgcagagcttgttttattacctccaggattcttaggacaacaagtaggtttaaaaggaccagccagtgtccaactttatttaagtattccttggtttgcaacctcaatatctactgttgcaggagcaataggcgcaggattgcttaatgatcaattaattaaagaaagcacatatggttaccgtcaaaaagtacgttatgaaaagaataactagttagtaataatgaagtgagaaacacttcattattatttttatataatataatgaatttatataaaatttctttaaaatcatttgaaatcatgaataaatataagtgtgaatggatatatggtttttcaagtatgactgaaaaggaagttaaaaagatagttggaaaatataaaattcatataagagtgtatagattatgaattgattacaaggatttagtagttaattataatcctagttttaaagaaaaggtagtaattacagttggagttacttcaataatgaaaaaaatggttatgaagtaggtacttatttaagtaggaataaaataaaacttatatttgtagttcgagaatattaattaaaaaaaggtgcgattccataataggaattcgcacctttttattaaaaattatttttcttcttttcttctattaaatccaactagtactgcaccagcagctaaagctaaaccgcctaataaaccagaattaacatttgattcactaccagtttcaggtaattctttattatcaacaacatcttgagaagtagtgaaattgttattgtgagtagttgtttgagttaggtcttcagtattagttacagggtgattaactactaattcttgacctggaacgatgtaatttgaatctacaaggccattatctttaacaatttgttctacagtagtgttatgtgcattagcaattttagctacagtatctccagtaacaacagtatgagtagttgtttcatctgtagtattgtctacatagtcagcaccatttttaccttcatcatcttgttcatctttttgaccgaagaagccatcaggagtagctggtttagtagtatctacatagtcagcaccatttttaccttcatcatcttgttcatctttttgaccgaagaagtcaccaggagtagctggtttagtagtatctacatagtcagcaccttcttcaactacatcagctttagggaagaaatcttcagaagtagctggtttagaagtatctacatagtcagcaccttcttcaactacgtcagctttagggaagaaatcttcagaagtagcttctttagaagtatctacatagtcagcaccttcttcaactacattagctttagggaagaagtcttcagaagtagcaggttgatcagtgttagcattagtagcaccttcttcaaccacatcagctttagggaagaaatcttcagaagtagcaggttgatcagtgttagcattagtagcaccttcttcaactacatcagctttagggaagaaatcttcagaagtagcaggttgatcagtgttagcgttagtagcaccttcttcaactacagatgcattgtgagaatttaataattcagtagtagcttcagtgttagtatcagcatttgtattatattctgcggcatccgcatcgtgaccagcagatacgaataataatcccccaattgctactgaagcaataccgacacttaattttctaattgaaaataatgtttttttattcataaaatacgctcccttaattaaaatatttaaattatttaattagtaactaattctatgcaaaatgattataaattgtaaaaaaataaaaacaactagaacttacgatgaatagcaaagaatatattactaattacaatttaatataacataaaaaaatgttgtgtcattaaaaaattacatttttttaatatttttttatataaaataaagattaaacaacaatatttttgattttgtatatttttaaaagtaatatatttaaaattttcagaaggcttatgagtgaatttataggaatagaatacattttaattccacttgactttctatatgaaactcgttaaagtattagcatattattctgacaattctgataggtattagattaataaatttgtaaatactgaggagggaccatgggtttatgtcagtatcaaagataacgtatgagagttttgatggcgatccatttattgactccatttctactgacgacgcgacaaagggtgcctatgaaattttaaaatgggcttatactacgtatggtgaagatatcgtttactcatgtagttttggggcagagagcatggtacttattcatttgatttatcaaattaaaccagatgctcaaattgtatttttagatacagatttacattttcaagaaacatacgatttaattgatagagtaaaagaacgttttcctaagttacgtattgaaatgaagaaaccagaattgacgcttgaagaacaagctgagaaatacaatcctgcattatggaaaaataatccaaatcaatgttgttatattcgtaaaattaaacctttagaagaggtactaggtggtgcgattgcctggatttcaggactacgaagagatcaatctccgactcgtgctaaaacaaatttcattaataaagatgaacgttttaaatcgattaaagtatgtcctttaatttattggacggaagataacgtttgggattatattaaacaacatgatttaccttataatgaacttcatgaccagcattatccaagtattggttgtattccttgtacagcgccagtattcaattctgatgattccagagcaggacgttggtcaagttttgaaaaaacagaatgtggacttcatgttgcagataaaccgtgatgtaaggtttaaaaaattttttatataaaacatagtattctgataaggatttaaaaatattctatattcgatttttactggaaagtcgaatatagattacataatatagagatagtaagtattttaaataaaataaagattgaaatgatagaggtggatgaattgaatctaagtgttactaatagtccttttactgaaggacaagccacacaaattaatgaattattacagacacttacgccagaacaaaaagtatggctaagtggctatttagttgcaaatcaacaacttacatcaggaacatctgagacacaaggttcacaaataggagctatttcaaaggatactgaaacaatgcttcaacaaaatgaaccaacaattcaacctgaaaaacgtgcgattacattattatatggttcagaaacaggaaatgcgcaaggtttagcagaaatatttgaagaacgtctttcaaatattggacataatgtaacgttaaaggcaatggatgaatttaaacctaaaaatcttaaaaatgtcgaagatttatttattattacttccacacaaggtgaaggagatccaccggataatgcagccgagttacatgaatttattcatggtagaaaagcccctaaattagaaggagtaagattttcagtacttgcattaggtgatcaaacctatgaattcttctgccaaacaggtagagattttgataaaaaacttgaagaacttggcgccgaacgattatatgaacgtgttgattgtgatgttgattatgaagaagatgccgaaaaatggatggctaatgtcattaatactattgactcagcacctgaaggtacacaaagtgaacaagttgtaagtgaatcaattaaatctgcgaaagaaaaaaaatactcaaaggcgaatccatatcaagctgaagtattagaaaatattaatttaaatggtagaggatctaataaagaaacacgtcatattgaattcttattagataactttggtgaagaatatgaagtaggagattgcttagtcgttttaccacaaaatgatccagctttagttgaattactgataagtacattaggatgggatccgggagatcaaattcaaatctcagaagatggagatacgatttcattagaagaagcattaacatcttactttgaaattacaaaattaacgaaaccattacttcaaaatgcagcagcatattttgataatgaagcgttagaagacaaagttcaagatagtgagtggatacaaaattatattgaaggtagagattttattgatttactcaatgatttcccacctgaagaattagaacctgaagatttatatcaaatccttagaaaattacctcctagagaatattctatatcaagtagttatcaatcattacctgatgaagttcacattacggttggtgcagtaagatataacacacacggtagagatcgttcaggtgtatgttctgttcaatttgctgaacgtattcaaccaggagatactgttccaatttatcttaaacgtaatccaaactttaaattccctaaagatggagatacacctgtcattatgataggacctggtacaggaattgcaccatttagagcacatatgcaagaacgtgaagaatatggttataaaggtaatacgtggttattcttcggcgatcaacactttactactgatttcttatatcaaacagaatggcaagaatggttaaaagatggtgttcttgaaaaaatgaatgtcgctttctcacgtgatacagatcaaaaagtatatgtacaacatcgcattgctgaacatagtaaagaatttaataagtggttagaaaaaggtgcatcgatctacatttgtggtgatgaaaaaaatatggctaaagatgtacatcaagcgatacgcaatgtattagtgaaagaacaaaatttaactgaagaagatgctgaaagctacttaaaacaaatgaaaaaagataaacgttatcaacgtgacgtgtactaaagaaagggtggagagtgaatggctaaaacgattaaacaaattgctgatgagttaaatgaaaaccttgatgcgttagaacatttaaaaactgaaagtaattatttacgcggtacgattgaagaaggcttagcagatcctttaactggtgccatttctgatgacgatactaaattacttaagtttcatgggagttatcaacaagatgaccgagatgtacgtgatgaacgtcgtaaacaaaaattagaacctgcatatgctttcatgattcgtgtgcgactacctggaggtaaagcaacacctgagcaatggattgcaatggatgatatttctaataattatgcgaatcatacattgaaactcacaacacgtcaaactttccaatttcatggtattttaaaacggaatttaaaatcatctatgaaaaaaattaatgaatcagtgttagatacgattgcagcatgtggggatgtcaatcgtaatacaatgtgtaacccaaatccatatcaatcaaatattaataaagaaatacttgattatgctacagccattagtgatcatttattacctaaaacgaatgcctatcatgaaatttggttagatggagagaaagtgcttgattctaaagaagaagtagagccaatgtacggggaaaaatatttgccacgtaaatttaaaattggtattgccgtaccaccatcaaacgatattgatgtattttcacaagatattggtttaattgcaattgtagaaaatgatgaactcgttggatttaatgtggctattggtggtggcatgggtatgacgcatggtaatccagatacataccctcaagtaggacgcattgctggatttattcctaaagataaagtcatagatgtatgtgaagcattacttacaattcaacgtgatcttggtaatcgttcaaatcgtaaaaatgcacgttttaaatatacagtagatcgttttggtgtagataatattgttaaagaattaaatacacgtctaggctgggaaatcagtgaagctcgcgaatttaaatttgaacataatggcgatcgtttaggttggattgaaggtgaaaaaggtgtatggaattatacattattcattcaaaatggacgtgtaaaagatacagaagactataagttaaaaacggcgttaagagaaattgcagaaacacatactggtgattttagattatctccaaaccaaaatttaattattgctaatgtaactgaagagaaaaaagcagatattcaatctcttattgataaatacggtttaactgatggtaaaaattatagtggtttaagacgtaattcaatggcttgtgtagcatttccaacttgtggtttagcaatggctgaatcagaacgttatttaccaacgctattatctaaaattgaagatttattagatgaagctggtgttagtgaaaaagagattactatacgtatgacaggttgtcctaatggatgtgcacgacctgcattagctgagattgcatttattggtaaagcacctggcaaatataatatgtatttaggtggaagctttaacggtgatcgcttaaataaactatataaagaaaacatcgatgaaaaagaaattctcgaaagcttacgtccaattttaatggattatggaaaatcacgtctcgaaggtgaacatttcggagacttcgttattcgttcgggtgtagtagctaaagttcatgatggtagagattttcacagctaatttttaaagaaatagaaggcgaacggggtgataagatgggaaaggtttatcttgtaggtgcaggacctggtgatcctgatttaataactgtaaaaggtatgaaagcgattcaagcgtcagatgtgattttatatgaccgcttagtgaacaaggaaattttagattttgcaaaacctcacacaaagttcttctattgtggtaaagatccaaataagcattcattgccacaagaggaaacaaatcgtatgttagtgaatttagcgaaaaaagggcacaccattacacgattaaagggtggtgatcctttcgtttttggacgtggtggcgaagaagcagaaatattatcggataatcaaattccatttgaaattgttcctgggattacatcaggaattgcagctcctgcttatgcaggaattcctgttactcacagagattatagttcatccgttgcgtttgttacagctgtgaataaaccaggtatgacgaaagaagcatattgggaacatttagcccatggtcctgaaacattgtgtatttatatgggtgtaaaacgtttgcctgaaatttgtgaactgttagtgcgtcatggtaagtcagtagatacacctgtagcgctagtacatttagggacaacagtttctcaaaaaacagtcactggaacattaggtagcattgtacaatgtgcatctgaaatcaaaaatcctgcaatgattgtgattggtgatgtggtaaatatgcgtcaaaaaattagctggttcaaagaacaagtatcagatgttgaaatgacattaccataatttgaaaaatatctaatataggaggacgacaatatgaaccatatgccgctcatgattgatttaagccagaaatcgattgtcatagtaggtggcggaaaagttgcaacgaaacgagcttcaactttaatcgaatattgtgatgatgttcatattgttagtcctattatttcaacaactttaaaagaactattagataacgaaattatcacttggagccaaaaagaatttgagccacaagatgttgaacatgccgatcttgtagtgattgccacaaataataacgacgtcaatacaaaggtgttagaaagtgttcctcattatgcattatgtaatcatgcttcgaaagcccaagttggaaatgttacgattccaagtattttaaaacgtggaaaactttctattagcgtgtcaaccaatggggcaagtcctaaattgaataaaaaaattatttcaagaataagcgatatgtacgatgaatcatatgaaatgtatattgattttttatatgaaagtagacaactaattaaacgattatcaatcgagccatctaggaaacaggatttattacaacacattttatctgatgagtatttagatgaggttaagcaacgagaattcacacgatggcttcatttacaagtttaggtatgaagggatatgtgatatatgagaaaattgtttatatttgcattagctggatttttagcacaacttgttgatggatcactcggaatgggattcggtgcctcctcatcatccatattattaacatatggaatagcacctgcgattgtttcagcaacggtacatttttcagaaatagcaacgactgctgcatctggtacatcacattggaaatttgaaaatgtacataagccaaccatgttgaaacttgcaataccaggatcaatcagtggatttatcggtgcagcattattaactcaaatacatggtgactatattaaaccttatatagcactattcttactttcaatgggtttttatattttgtatcagttcttatttaaacgtcataaagactttcatacacacgtaggaacacttagtagtgtgaaacttgttccacaaggagccgttgctggttttctagatgctattggtggtggaggctggggaccagtcaatacaccgttgttacttgcaagtcataaaattcaaccacgctatgccattggtacagtgtctgcaagtgaattttttgtaacactttcaacatcattaagttttattatctttttaggatttactcaaattaattggtggtttgtcattgcattaagtataggcggtatgattgccgcaccaatttcagcctatttaactaaaatattacccattaatattttagcaatttgtgtaggtggccttattatttttacaaatagtaatgctttaatgacgtatttcatcaaagatactacagtgataaatgttattcgattcgcaattatttgtgcgattattgtattagttattattactattattcgtaacaaaaaattgtctttttcttataaataaagccgagtaaactaatcaaaataattagaaaaggggttatcaatgatgacaacaaatgaagatattatcaattatacaattaagccacatggtggagagttaattaatcgagttgtagaaggaaaggaaagagaagcattaattgaaaaagcgaacgcttttaaatcattaactttaaatccttggtccatttcagatttagaattaatcgctattggtggttttagtccacttactggatttatgggagaagcggattataaaaaagttgttgaagatacacatcttgaaaatggactagtatggagtattcctatcactttacctgtcactgaaacacaagctaatgaacttaatattggtgatgatattgctttatatggtgaagatggagtactttatggtactttaaaacttgaagaaaaatatacgtatgataaagaaaaagaagctcaaaatgtctacggtacgactgaagaagcgcatccaggtgtcaaaaaagtatatgaaaaagggaacgtttatttagcaggtcctattcaattagtaaatcgtcctaaacatgatgaattttcagattatcatttagatcctgctgaaacacgccaattgtttaaagacttagggtggaaaacagtagtcggatttcaaacacgtaatcctgtccaccgcgcacatgaatatattcaaaaatctgcattagaaattgtagatggtttattattaaatcctttagttggtgaaactaaagcggatgatatcccagcagatgtacgtatggaaagttatcaagctatcttgaaaaattacttccctcaagatagagcacgtttagttatctatcccgcagcgatgcgttatgcaggtccccgtgaagcaattttacatgctacagttcgtaaaaattatggttgtacacactttattgttggacgtgatcacgcaggtgtgggtgattattatggtacttatgaagcacaagaacttatctctcaatttgaagatgaattagatattcatattttaaaatttgaacatgcattttactgcaaaaaatgtagcaatatggctacagctaaaacgtgtccacatgatgcatcagaccatgtacatttaagtggtacaaaagtaagagaaaaattacgtaatggcgaatcattaccaaaagaattctcaagacctgaagttgcagaagtattaattaaaggattaagacaaaagtaatttgggggagtatataatatgagtcaatcaacaaatattacatggcatgattcagaagtaactaaagaagatagacaacaccaaaatggtcataaaagtgctgtcatttggtttacagggttatctggttctggtaagtcaacaatctctgtggcacttgaaaaagcgctatttgaaaaaggtaaacattcatatcgattagatggcgataatgtccgtcacggtttaaataaaaatttaggttttagtccagaagaccgtaaagaaaatattcgtcgtatcggtgaagtaagtaaattgcttgtagatgcagggacaattgcaattactgcatttatttctccatatagagaagatcgtgatgaagtacgtgatattttagaagacggagaattcattgaagtatatacggagtgcagtgtagaagaatgtgagaaacgagaccctaaaggtttatatgaaaaagcacgttcaggtgaaattaaagaatttacaggaattagtgcgccttatgaagcgccaaaacatcctgaaataactattaatactgaaacacaaagtatagatgaatcagttgaacatattcttaattacttaaaagaacacaaatatatttaatgaataaccaaacgagtgagataacgaatttaaaatgaatgttgtctcactcgtttttttgctataaattcttgaaaataatagttaatattcccttattttatgaaataaaacatatttaaaataatcagatatattacaccatctgtaatgacactgttgattaaattgataaaaagactgataataaagcattttgaatgatgtaacaaaagagagatttaattacaaaaaccatcctattattatgattcaattacaaggtattaacaacgcccacaaacgcttgtttatctgataaagtatgtcttgtcgttaattaacgagaaaaaataattcgaagtaatttaatattgagatgtcatttgaaagtagccacgtgataaataaaggaagaatgttttaaatttctaggaggatatttaattatgaaaaaaatcgctacagtaactatcgccacagccggaatcgctacagttggatttgcgcatcatgacgcacatgcagcggaaaataatggatataaccctaatgacccaacttcatatagctactcttatacaattgatcaacaaggtaactatcattacacatggaaaggtaattggagtcctgatcgtttaaatcacactaatgactcaaatcatagtcaatctaactataataattacaacaataatagctataactacaatagcaattattcatatacaacaaacaataaccaaacatctactaacaataatcaatcttatacaactaataatacgacaggtggattaggcgctaacactgcatcaacatcaaatagtaatgtaaaagttacaactcaaagtgcaccaagaacacaatcaactgcttcgactcaagcattttcaggtaaaacaaattcaggtgcgaattactatacttggggtcaatgtacgtattatgtatatgataaagttggtggttcaatcggtaacacttggggtaatgcaaataactgggctaacgcagcagcgcaatctggttatactgtaaacaatacacctaaagcaggtgctgtgatgcaaacaactcaaggtggttatggtcacgttgcatatgttgaaaatgtaaatagtgatggttctgttacagtatctgaaatgaactatcaaggcgtaggtgtagtatctacacgtacaatttcagaaagtcaagcaagttcatacaattacatttcataatttaaggaaataaattatttaaacattaatgtaaaataatggctaagatatttaaacaataatgttatttaaaagagcaagtatatgaattcaaaacgaattctaccttgctctttttttatttttaaaaatcgcatttaatatgatttaaatcgctttataaagggaaatatataactactaattcttatagtgttcaaatataaaggtggtgattcacaatggcgttaggagtacttcaatggatcctagtgatcgcaattgtggtaattacgattggcgtcatatttggtctcatttggggttcgctttttgaggaacgcttttatagaagtcgttctaaaaaagaagaagaagcacgtattgagaaaaatcttaaaatggcaaaaggccataccgatgatgacgtagcatatgatgaagaaggtcgtgcatcactcaacgaagatgataaaaaacaataaatattcataaacctttaagaatccgtttgatttttaaaggttttttcttatcaaaatatttatattaattaactttatgcaattatatacttttaacaaataaaagtgataaaatagatatgttaaaaaattcacatgaattatttaaagttaggagttattataatgctactgtttatagtagaaattatcataatgattgtagccattatgctaggattgcgcacagcaggtgctttaggctgtggtatttttgctattgtggcccaactgattatgatatttggttttcaacttcctcctggttctgcccctgttacagcagtcctaattattctggcaattggtatagctggaggaacgttacaagctacaggcggaattgattatcttgtctatcttgcttcgaaaatcattgaacggtttccaaaatcaattatttttattgcaccgatgattgtatttgtcttcgtatttggagtagggactgcaaacattgctttatcactagaacctattattgctcaaaccgcagtaaaagctaaaatccaacctaagcgaccactcattgcttcagtattaactgctaatttggctttactttgtagtccagctgcatccgcaacagcctatgtcatttcagtacttgcaggtcatgacatttcaatgggtcaatatttgagtatcgtcttacctacatcattaatcactatgtttatgttaagtatattttgtacgtttgtaggacgtaaaaatacaattactgaaagtgaaattgcccatacacctgacgttgaagtaaatcatgctttttctactagagtaaagataggtgttttagcatttattttatgtgtgtttggtattcttacatttggtatttttcctcaattcatgccttcgtttaatgtcaatggaaaagatgtcactgtatcaatgacagagattgtacaattctttatgtatttaagtgcagcaattaatttattgatgttaaaagtgaatacgagtgatattctctcttcaaatattacacaatctgctattggcgcattatttgcagtactcggacctggttggttaggtgcgacagtatttaacgcacctcataatttacatatcatacaaaatgatgttggcaaaacgattcaacatatgccctggcttgtgattattcttgtagctgtagtagcgatgattgttatttcacaaacagcaacagcatcgattatggtccccatcgtcatgagtatgggaattccacccatgtattttgtagcaatggtacaaacattaaatgttaactttgttatacctgcgcaaccaacgttattattcgcagttaatttagatgaaacaggacgtacacgacctacaagctttattattccaggattctttgcaataggtatttcagttattgttggttttataataaaaataatattaggatattagtttataatagagtattattcatataaacgatgtaaagtttcatgaaaatttaatagattgagaagaccttttgtgcctttttgaatattgaagagaagaatgtgaattctattatgaattgcattcttctcttatttttaatttaaaacagagaatttcaaaaaaatatatattcattaaaagtgaataaaaattcaatgtttataatttaatatttgtttaaaacgtttatttttaatttaacactattgatatagttaaatttttcgatagttttaatggaataaaatatataaatattcagttttgctcaaataattttatgaatgtaatttgcatttttatttaattttagatattgtcatcatgtggttcattcacgtaaatacattataagtcgtacatataatattcaaaggaggatcttagttgaaaaaagaaaaaataatggattggcccacctttataggtactgttattgtcttacttgcagcagttatacctatgatggtctttccaagtgcaagtgagaaagttattactgatataaatagtgctatttctaactcgataggatctgtttacttatttataggtttagctgttttatcctttgtactctatattgctttcggccgatatggtaatgtgactttaggaaaagcaagtgataaacctgaattcaataattttagttgggctgcaatgctattttgtgcaggtattggttcagatattctttattggggtgttatcgaatgggccttctattatcaggtacctccaaatggggctaaaggaatgactgatgaggcgcttacatatgcaacgcaatatggtatgtttcattggggacctattgcatgggcaatttatgtattaccagctttgcctattggctatttagtatttgtaaagaaacaaccagtatataaaattagtcaagcttgtcgtccagtactgaaaggacaaactgataaatttttaggtaaattagtagatatcttatttatatttggactattaggaggagcggcaacctctttagcattaggtgtgccattaatttcttctggaattgaacgattaacaggtatagatggagacaatatggttattcgctcaattatacttttcacaatcacagtcatttttgcaattagttcttatactggtttaaaaaaaggaatacaaaaattaagtgatattaacgtatggttatcattcttactacttgcatttgtatttattgtaggtccaacaatttttattatggaaaccactttaactggctttgggaatatgatgcgagatttcttccatatggcaacatggatggagccatttggtggaattagaaaccgtaaagaaacaaatttccctcaagattggacgatattttattggtcatggtggcttgtatatgccccatttattggtttatttattgctcgaatttcaaaaggtcgtcgtctcaaagaagtcatattaggaacaattgcttatggtacattgggatgtgtcttattctttggtatttttggtaactatgccgtttatttacaaattagtggacagtttaatgtggttgattttttaaataaacatagtactgaagcaacaattatagaggttatgcaccaattgccaatgggttctttaattatagtgttgttcttaatatctgcatttttattcttagcaacgacttttgattcaggttcttatattttagcagctgcttctcagaagaaggtaataggggaaccattaaaagcgaatcgtttattctgggctttcgctttatgtctattacctttctcccttatgttagttggtggagaacgagctcttgaagtgttaaagactgcttcattattagcaagtgtaccacttctatttatatttacgtttatgatgatatcctttattatcacacttaataaagatcggattaaactggaaacaagagcagataaactaaaagaagtagaacgacgttcacttcgtattgttcaagttaaatcagatcctgaagacgataatttataatgtgaaaaatgatagtacatttaaaaatcctcagaaattagataataaatctaatttctgaggatttttgaatcatattgataatgaagtaagttataaatcttcttcttttggtataggataatgttcgaaaatgtctccagattcaatcgcagagcttaaattttttaaccatttataatataattttgtgtggttcaattgggattgtatactatctattttttctttttcttcttcacttaaattattagtttgtattatgttgtgaagaatgttttctgcttttttcgtcgcttctaaatttgtatcgacttcacgttcccatttttgtgtgaaaaagtttcgaaaaaaaataaaaaaatctttctcggctataaaatgttgtttgcgactgccacgggtaaattgttgcttaacgatatcgtattcttgcaatttttttacaccagcactcatactaggcttgctcatttgtaaatgttcacgcatttcatcaagcgtcatactaccttcaaaaaccatcgtaccgtaaagattaccaacactacggtttgtaccatataaatccatggtttcaccaattgagttaataactaaatctttcgcttcctctattttttgattaatattattagaattgctcatattgcacctcacttattttcatcttcataagatgtgaaatattaacacaaattttacattctcactcattatatggttttttcttaagagtttcaaaagtcaattttaatccctacaatattaaaaataatataaaaaaatatataaagatgatttttgcaatgacttaagaaatatgataagctacttttgtaaaatttgttaaataaaaatttaacaaacttaacggaggtagtatgatggaacttgtaaaagcattgtctaatcgtcaatatatcaatggtgaatgggtagagagcgctaacaaaaatactagagatattattaatccatataatcaagaagtgatttttactgttactgaagggactaaggaagatgcagaacaggctattttagcagcacgtcgttcatttgaaaatggtgagtggtcacaagaaacaagtgaagtcagaggtaaaaaagtaagagcaattgctgataaaattacagaaaatcgtgacgaattagccaaattagaaacgttagataccggtaaaacattagaggaatcttatgcagatatggatgatattgcaaatgtgtttaattattttgcaggtttggcggataaagacggaggagaaattattgattctccaatacctaacactgaaagtaaacttgtcaaagaacctgtaggtgtagttacacaaattacgccttggaattatccattattacaagcttcatggaaaattgcacctgcattagcaactggttgctcattagtaatgaaaccaagtgaaattacgccattaacaacaattcgtgtatttgaattaatggaagaagttggattccctaaaggggttatcaacctaatattaagtagtggtgaagaagtaggagatacattatcaggtcataaagaagttgatttagtatcatttacgggtggaattgaaactggtaaacacattatgaagaatgctgcaaatcatgtaactaatattgcattagagcttggcggaaagaatccaaatattatttttgatgatgctgattttgaattagctgtagatcaagcattaaatggcggatatttccatgcaggtcaagtttgttcagcaggttcaagaattttagtgcataacgatattaaagataaatttgaaaaagcattaattgaacgtgttggaaaaattaaattaggtaatggatttgatagtgatacagaaatgggtccagtgatttctctagaacatcgagataaaattgaaaaatatatgaaagttgctaaagatgatggtgcaaccattgctatcggtgggaaacgtccagacgatgaagatttaaaagatggtttattctttgaaccaactgtaatcactaattgcgatactcatatgagaattgttcaagaagaagtatttggtcctgttgttacagtagaagggttcgataatgaagaagaagcgattgcactcgctaatgattcaatttatggtttagcaggtgcagtattttctaaagatataggaaaagcacaacgtgtagctaataaattaaaactaggcacagtttggattaatgacttccatccttacttcgctcaagcgccatggggtggttataaacaatctggtattggacgtgagttaggtaaagaaggattagaagaatatttaatctctaaacatattcttacaaatagaaatccagaacctgtaaatttctttagtaaataacttttacaatttaactataaaggaccgtaggcgtattattttacggtccatttattttgaagtataaagatgtatcaaatcaaactaaattgtatttaaatagaagatttatatttttaggggaggacgacaatatatgagtaaaaatcaatcatatgattacgtaattattggtggaggaagcgctggatcagtattaggaaatcgtttgtcagaagataaaaataaagaagtacttgtactagaggcaggacgtagtgattatccatgggatttatttatacaaatgccggcagcattgatgtttccttcaggaaatccattttacgattggagataccaaactgaagaagaaccgcatatgggacgtaaggtagaccatgctcgaggtaaagtattaggtggttcaagttcaattaatggcatgatttatcaacgtggtaatccaatggattatgaaggctgggctgaaccagaaggaatggaaacttgggactttgcacattgtttaccttattttaaaaaactagaaaaaacatttggagctgcgccatatgataaatatagaggacatgatggtccgattaaattaaaacgtgggccagccacaaatccattatttaaatcattcttcgatgcaggtgttgaagcaggttatcataaaacaaacgacgtcaatggatatagacaagaaggctttggtccatttgatagccaagtacataatggtcgtcgtgtttcagcttcacgtgcctatttacgtcctgcaatgaagcgtaaaaatttaacagttaaaacacgtgcatttgttactaaaatacattttgaaggtaagaaagctactggtgtaacgtttaaacgtaatggtaaacttcatactgtgaatgccggtgaagtgattctttcaggtggtgcatttaatacacctcagttattgcaattgtctggtatcggtgattctgaattcttaaaatctaaaggtatagaaccacgcatgcacttacctggtgttggagaaaacttcgaagaccatttagaagtatatattcaacataaatgtaagcagccagtttcactacaaccaagcttagatgtaaaacgtatgccttggattggattacaatggatatttgcacgtaaaggtgcagcagcttcaaaccactttgaaggtggcgcttttgttagatctaacaatcaagttgcatatccaaatttaatgttccatttcttaccgattgctgtaagatatgatggtcaaaaagcaccagtggcgcatgggtatcaagtacatgttggtcctatgtattcaaattcacgtggtagtttaaaaattaaatcaaaagatccttttgaaaaaccaagtattgtattcaattatttatcaacaaaagaagataaacaagaatgggttgaagcaattcgagtagcacgtaatattctatctcaacctgcgatggatccatataatggcggtgaaatctcaccaggaccatctgtacaaacagatgaagaaattcttgattgggtacgtaaagatggcgaaactgctttacatccttcttgtagtgctaaaatgggaccagcgtcagatccaatggcagttgtagatccattaactatgaaagtacatggtatggaaaatttacgtgttgttgatgcgtctgctatgcctcgcactactaatggtaatattcatgcaccagttttaatgctcgctgaaaaagcagctgatatcattcgtggtaaaaaaccattagaaccacaatatgttgattactataaacatggtgttagtgatgaaaacgctggagcaatggaattcgatccatactataaacattaataaaatatttatatgaaataagggttggaatcaaagatgattctgacctttttattttaaatatccccttctacaacatttttaatacgtaaaggcatataatgaatgaaagagaaggagtgaaatgaaatgattaaagatttagtgcaacgtttacaagataaggaaaaacgtatgatcgaggttcgcagacatttacatgaatatcctgagctatcatttcatgaaactgagacacccaaatatattgctaatttttataaagataaagattgtaaggtagaaacaaatataggacaaaatggtgtaaaagtgacgatagatagtggtaaacctgggaaaacgattgctattcgagcagattttgatgcgcttcccattcaagaagatactggtttatcatttgtttctaaaaacgagggagtcatgcatgcgtgtggacatgatgcacatacagcatatatgcttattttggcagaaacattgatagaaatgaaatctcagttcagtggcaaagtaattgttattcatcaacccgctgaagaaatgccacctggtggagctaaaggtatgattgaagatggcgtattggatggcgtggaccatgttttaggtacccatgtgatgactaatatggcgcctggtaaagtctattatcataagggtaacgttcaaacaggacgttcttactttaaattaattgtaaaaggtgaaggaggacatggttcttctccgcatactgcaaatgatgcgattatagcgggagctcatttcgttactaccgctcaaacagtggtctcacgtcgtcttaatccatttgaaacgggtgtcgtcacaattggatcatttgatggtaaaggtcaatttaatgtgattaaagataaagtaaccattgaaggtgacgttcgcgctttgacagatgctacacgtgatcgtattgaaacggctttaaaacaaatggttcacggtttggaagaaacatttggtgtaaattgtgagtttacatttagtaaagattatcctgcattgtataatgatcctgactttactgaatatgttgcagaaacaattaaacagtcaaaattagctgatgttaaaggcgtagaaatatgtgaacctcaaccgccatctgaagatttcgctttttatgctaaaacattgccaagtacttttatatattctggagcaaaacctagaaagggtaaagcatatccacatcatcatcctaaatttacgattgatgaatcaagtatgttagttgcagcagaagcagtaggtgctgtggtattaaactatctaactattgaataagcagtcatactatattatatatttataagaaatcaatttacatttttaaagtagaagtcgagttgatattctagtattaaagaatgtgtcatgatagtattattctatatctagatattggggtgagttgatgagtttctatgattttatgcaaggatttattgatgataagaccccattaggtgaacttgcatcatggataaatcaagaccaagattttccaaaacatgaatatcttgctgaaaatatacttgattacttttctaagatgtcgatgttagatcatgaatgcttagaaattgttaaacgttccctttcgttatatgaaggaagatagatgtgaatagcaaaaataaaaaatgatagcttaaagctagttaagaaatgaaggaacaaagaaatgactttaactgatagttataaaacatatgtcatagaagaaaaagaagatcaaacgatgtctatcgaaaaaaataatgatgttcaattatatacagtacttgagtcaataaatgagttaacaaacgattcaatgtgtgttttaaatcacttgtttgttaatgaaggtaatgaacctcaatttgaatctaaatttttaaagcgcactaaatatttacaagatgtgccaggattcaaagctttacgttttttacgtcctcaaactaagcatcgtcattatattattttgacgttatggaaagatcgacaatcgttctatgattggcaaagttcagacgcttatggtaaaacgcataaacaaagaggcactaaacaaggtgtcgataataaaatagttaatcgcgatttatcttataatgtaagaatagaacttgctaatttagaaacgagtattgatatagataatatgtttaatattcaaagattaagtttctaaaaaagtaatatactggtatagaaacttaatcttttttatatttaaaacaaataccgcgtagaattgcatgaaattaagatgtatgattttatgaacaatgaagacttaaaaattggaaggaaagtaaagtaatgaatcatttaaatttattagcaccagaaacatataatattgtatctgaaatagaaaaacatgcttcaaatcaaaataaacaagcaattatttatgaaaatggtgtagaagaacccattagtgtgacatactctgaattaattaaaaacgctaataaagtaggacatgtattattaaaccatggactaaaaaaaggcgataaagtgttaatcatgatgccacgtgctatcatcacgtatgaactttatattgcagcattaaaattaggtattgcaattatcccgagttctgaaatgttaagaacaaaagatttacaatatcgtattacgcatggagaaattaatgcagttattgcgttagctgattttatagaagaatttagagacattaaagaatatcatgaattaacaaaatttgttgttaatggaaatgaagagaattggattagtattgaagaggaaaaagtaaagcaaagtgatgaattagacacagcaaatacaacaagagatgatgttgctattttatcttatacttctggaactacaggtaatccaaaagctgttacacattctcatggttggggatatgctcatatgaaaatggcacctgaacattggttagctataaaagaagatgacttggtgtgggcaacagctgcacctggttggcaaaaatgggtatggagtccattcctatctattatgggatcaggagcgacagcatttgtgtataatggtaaatttaatccttctcgttatttatcattattacaaaaatttaaaattaatgtgctttgttgtacaccaacagaataccgtatgatggcaaaattagataacttagataaatacaatttagatcatttacacagtgcagtatctgcaggagaaccattaaatagagaagtagttgaacaattccgtaaacattttaatttaacagtgcgtgatggatatggacaaacagaaagtacgctattaattggtttcttaaaagatacagaacaacgtcctggttctatgggtaaagctattcctggtagtcgtgtagcagttgttgatgatgagggaaacaaagtggatacaaatgtaaaaggtaatatagcattaccacttgatttccctggattatttaaaggttactttaaagatgagaaacgtacaaaagatgcacatgcaggagattattatattactggagatttagcacatatcgatgaagatggttatttctggtttgaaggtcgccgtgacgatattattattagttctggctatactattggacctttcgaagttgaagatgcactcacaaatcatgaagcggtaaaagaatgtgcagttgtagcaagtccacatccaattcgtggcaatattgttaaagcatttattattttaaaagagggttataaaccaagtgatgatttagtgaaagagttacaaactttctctaaaaaagtagtcgcaccatataaatatccacgggcgattgaatttgtagaagatttacccaaaacaaactctggcaaaattcgtcgtgttgaattacgcgaagcagaacgcacaaaacataacaacgctcaaaataaataatcatatgcatcacactgataaattagtatgtcactaatttatcagtgtttttttatgatgagcatactgatgtatcagataacatcaatgttggaaatatgtctatatttaaaaaaattgaaaataaagataattttaattgtatttcatgcattattatgacatacttttaaataattagtatgacataataaaaatttgaggtgatttataatgactaaatatatttatgcatttgatgaaggacaaaaatcaatgagagatttattgggaggtaaaggagctaatctatctgaaatgaaacgcttaggtttacctgtaccagatggtttcaccattaccacaacagcatgtattgagtatttaaaacaagggaagtcattatctactgagatcaaaacagaattaattgatcacttggcttcattttcagagagaaccggaaaaatcttctcttctgatacgaatttattgcttgtttctgtaagaagtggggcaaaaatttctatgccaggaatgatggatacaatattaaacttgggtttaaatgatgaaaatgtagaaaaattagctgaaaaaactggggataaacgttttgcttatgactgttatcgtcgtttattacaaatgtttggtgaagtcgtatatagtgtgcctatgcaagcatttgatacatatttcgaacagtataaaaaacaacatcattttgagaatgacgctgccattagtgcagatggtttaaaagaaatttgtaagcgctttaaagagatatatgtagaagaagtacatcaacctttcccgcaagagcctttgaaacaactggaagaagctatagaagctgtatttaaatcttgggataatgatcgtgctcgtatttaccgagatttaaatgatattccacacgacattggtacagcagtaaatatccaagaaatggttttcggtaatagtggagataatagtgggacaggcgttgcttttacacgtaatccagtgactggcgaaaataaattatttggtgaatatttgcttaatgcgcaaggagaagatgttgttgcaggtattcgtacacctaaagatatctcaacattacacgatcaaatgccagaggttcatcaagaatttgtagatgtgacaaaacaattagaaaaacattataaagatatgcaagatattgaatttacaattgaaaatggacaattatatttactccaaactcgtaatggtaaacgtacagcacgtgcggctattcaaattgctgtagatttagtgaatgaagacattattactaaaaaagaagcaatgaaaaaagttgaagtaaaatcaattgatcaacttttacatcctaatttcgatgagtcttcattaaaagaagcaacagttgtatctaaaatgggattgccagcgagcccaggtgctgcaacaggtcaaattgtatttactgctgaagaggcgaaagcacaatcagagcaaggtaaaaaggtgatcttgatgagaccagaaacgtctcctgaagatattgaaggtatgattgcaagtgaagcgattgtaaccacacatggtggcatgacgtctcatgcagcagttgtagctcgtggaatgggtaaatgttgtgtgacaggatgttctgatttagaaattaatacgagtgctaagacggtatactatggcgatcaaacactacatgaaggagatatggtttcagttgatggttcagaaggtgacatttatttaggtgagattaaaacagtcaatgctgagcatagtgagtcattcaatcaatttatggagtggtcagaaaaaacagctcgtttaaaagtacgtatgaatgcagaaacacctcaagatattaaagtaggttaccaatttggcgctaaaggcatcggattagtacgtacagagcatatgttctttggggctgagcgactagtagagatgagacgtttcattctatcatcctctcgtgaagatcgtctcgaagcacttaatcatattaaacaatatcaagtagaagactttaaagaaatttttaaattatcaggtgaacatcctaccatagtgcgtttacttgatccgccattgcatgagttcttaccacattctgaggaagatattgcgaatgttgcgaagcaattaaatataccgaaggaaacattagataaacgcattgtggatttaaacgaagtgaatccaatgcttggacatcgtggttgtcgtttagcaatcacataccctgagttatatgaaatgcaagtagaagcgattattgaaagtgtatttaaattaaaagaagaaggcattcagtgtaaaccagaaattatgattccgttagtgtctacagtagaagaatttaccactttaaaagaaaaccttgttaagacgattacccaattagaaaaacaacatcagaaaagcgtagattacttaatgggaacaatgatcgaaacgcctcgtgcatgtcttatttcagacgaattagcaaaacattgtgatttcttcagctttggtacgaacgatttaacacaattgtcatttggtttttctagagatgatgcagggaagtttataaatgtgtatactgaaagaaatatattgaaacttgacccgttccaaacattagataaagatggcgttggaaaactaattgaagtggcagttaaacaggcaaagaaagtgaacgaaaatattaagattggtgtatgtggtgaattaggtggagatgcgaaatctattcattatttcaatcacttatcaattgattatgtatcatgttcaccattccgaattccaggagcaattttagcgactgctcaaagtcaagtggaggaaagtgagtaatcaaaaatgaatgaagtcgagtcacaagcgcataatttaaaattgtttattgtttcagattcaattggagaaactgctcaacgtatgattcatgcaaccttaacccagtttccagatttaaataatgtagaaataaaaaaatttccttatattaaagatgaggaagaatttttaaatatattaaatttagcgaaagaacacaacgcaatagtagctacgacattagtaagtgaatcatttaatgcacttggtcacgaatttgctagagaacatgatatcccatatgtagattatatgtctgatttaattagcattgttgaacacgtgacaggtgaaaaaccattgatggaaagtggtgcattaagaaagttaaatgaagcttattttaagcgtattgaagccattgaatattcagttaaatatgatgatggtaagcatttttctgatataggtgaagcagatgcattgattgtaggggtatcacgtacttcaaagacaccattaagtatgtatttagcgaataaaggctacaaaatagcaaacattcctttagtacctgaagttagtattccagacagtgtttttaagcaaaaagggttacaagtatttggattaactgcaagtccacagtatattgcaaatatacgaaaaagtcgtgctgaaacattaggtttgtcaaaagcgtctcaatataataatttaaatcgtataaaagaagaactcagttatgcagaagaagtatttaaaaaattaaatgctacagtgattaatactgagtataaatcaattgaagaatcagctttttatattgaaaagtttttacaaaataataaataatcatcatataaggttgtaagtaaatcattaagtgattgtaatgacatcatgttataataaaactttgatcattcaactaaacattcttactgtttagcttatattgataaatctttctgcttaatttaatgataatgaattcattaattcaaataattaagtttttctgatttacaattgacaatatttgttttaacatagtaatgaaagacttaacacattactaaaaacaatatattgattactaaatattagggaaacaagagcaacaggtaattatattatattgtgaaacataatttttggagaggtgtacaaacatgacagaatcaaaagatatgattattgtcggtgctggtgtaattagtacaacagttgcatctatgttcaatgaacttgtacctaactggaacatcgatctttatgaacgtttagatcgtccaggtattgaaagttcaaatgaacgtaacaatgctggtactggtcacgctgcattatgtgaattaaactatactgtaagacaaccagatggtacgattgacattgaaaaagcaaaagaaattaatgaacaatttgaaatttctaaacaattttggggtcatttagtagaatcagaacaaattaaagatcctagagatttcattcatcctttaccacatatcagtttcgtacgtggtaaaaacaacgttcaattcctaaaagaacgttacgaaaaaatgaaagatttcccaatgttcgatgatatcgaatatactgaagacatcgaagtaatgagaaaatggattccattaatgatgcaaggtcgtttcgatgatggcttaatggctgctagtaaaatcgacgaaggtactgacgttaactacggtgaattaactcgtaaaatggcacataacttacaaaacgacgattcaaacgtaaacgtcaactataatcatgaagtacaagacttcaaacgtttatctaacggtaaatggcaagttaaaattaaagacttagctaacaataaagtctttactaaagaagctgaccatgtattcatcggtgctggtggtggatctattccattattacaaaaaactggtatcgaagaaggtaaacatatcggtggtttcccaatcattggtcaatttatcgcttgtacaaatccagaagttatcgaacaacatgatgcgaaagtttatggtaaagagccacctggcacaccaccaatgactgttcctcacttagatactcgttatatcgatggtgaaagaacattattattcggaccattcgcaaatgttggtcctaaattcttaattcacggttctaacttagatttattcaaatcagttaaaccacacaatatcactacgttattagctgcagcagttaagaatatgtcattacttaaatattcatttgaccaaatcatcatgactaaagaaggttgtatgaaccacttacgtacgttctaccctgaagctcgtgatgaagattggcaagtatatactgctggtacacgtgtacaagttattaaagatgatgaaaaagaaggtaaaggattcatccaattcggtacagaagtggttgactctaaagaccactctatcattgctttacttggtgaatcaccaggggcttctacatcagtttcagtagcgttagaagttatcgaaagaaacttcgaacaatatttagatgaatggaaaccaaaaatcaaaaaaatgattccttcatatggtgaatcattaattcatgatgttgacttaatgagaaaaactcgtcgtttaacatctaaacaattagaattaggtttctatgaaaatactaatgctaaataagaaaaattaaaaaactgttaacaggacatcacgttctgttaacagtttttttattaaataaatttaatggttataactgcttaaaaacatgaaaaaagtgatgagcacgttactcatcacttttgaataaaaatctgactattaatttttatttactgaagcatcgtagattgaatctactgcatcgcctaaagctttatcaaattcttcttttgattggcctgcacgtaaatcacttgctaatgcacgtgagaagcttgcaattaattcatcattgtcttttaataatttgtttgcttcgtctctgctgtaaccaccagataatacaacaacacgaacaacatttggatgatcagctaattctttgtataagttagctttagtagggatagttaattttaacattactaattgatcatcatttaaagaatctaagccttttttaagttcagcttttaatacttcttcgatttcagctttgtctttagcgttaatgtttacttcaggttcaatgataggtactaaacctttagcaatgatttttttagcaatttcaaattgttgttcaacaacgtctttgataccttgttcatttaattctaagatgttagaacgcattttagtaccgaagatatgacgttcaactgcacggtctaaagtttcatctaagttgtcgataggtttcattaattggacaccattttgctcttcagctaaacctttgtcgacttttaagaaaggaacgacacctttatcagctaagtagtcaccagtatatttaccttcaacttcacgatccatagtttgttcaaatagaatcgcacctaaaattttatctgaagtaaatgaaggtgaagtgacaacacgtgtacgcatatcatgtacaagttggaacatttcgtcatcattgctgtattgatcttcgtttacaccatattcttttaatgcttttggagtactaccaccactttggtctaatgcagcgatgaatcctttcccatgacttactttttctaattgttctttattcattatgcctttcactcctttaataaactttcaatattattatcgtaaaaaataataatattctcaagtataaagtaattaattattgaaatttcttaattaacaatttacaattttatgaaattaccgtattttatacatttaatgtaaacattcaaacatattcaaaggggattgttatgaaacaacgtatattaattattggtagccctggttctggaaaatcaacattggcatatcaactacacttaaaatatcaactgccactttaccatattgatcaaattcaatggcttaataataaaaacgtcattacttttgaagaattaaaacaaaaacttgaatctattgtagtaaaagaggaatggattattgatggaaatgattctagtacacttagtatgagattaaaatatgcaactaaagtcatatggattaaagaaccaaaagtaaaatgtatatttagagtaatcaagcgttacatatattcactatttaaaagagaacatatcggaggaaatcctaaaacattaagttttgaatttattaagtatatttgggattttcctaaaaataatgagcaatttatcatgcaacaaatgaaaagatcaataccaaatgttcagtggatcatcgatgattctaaagcattatctttacgttttctttaaaaaatataaactaatttctttaaaattttaatatatgtaattattaaatagaatattttataaaactttagtgtattgtatattttttgttgaaatatgctattctaaaataagttaagttcttattaattgaagttagtctttatttttaaatcgtttatatatgataactaagttcttaattaatacgtatatactttcttggaggaacagtaatgaagaaaaataaaatttttgctgtattaacaacaagtgctctattactggctgcttgtagtaatggagataatgcatctgatagtggacaaaaagatggaaatcagaaaaatgagcaatctagtaataaaagtggtaatagtcaaagtgatgcattgaaaaagaataatgataaaaatacaaatgaaaataaagtagattatcctaaagatggtgttaaagggatttatgtaacaagtaattctacacagggcaaaaaaatggatgagttagttaaattcatcaaagattctaatttaaataccatggttattgatgtgaaagatgatacaggtaacattactatgaaattaaatactggcaataaacaagtggataaaaatacgcttgatattgtagatggtaaaaaattattaaaaaaactgcatgataataatatttacccaattgcacgtattgtaacatttaaagatacaaaattagcaaatgaacaccctgaatggacattcaaaaatagtgatggttctgtttggacaaatggtaaaggggatagctttgttaatccatttatgaaggaagtatggaagtatgatattgatgttgcaaaagcagctgcaaaagcaggcttccaagatattcaatttgactatgtacgcttccctgaaggatttgaaaatcaagcggatagcttaacgtataataaaggggaatataaaaatagtcagatgagttcaggcgaccaacgtgtagatacaattactaaattcttagaatatgcaaataaagaattaaaaccaatgggcgtcaatgtgtcagctgatgtatttggttattctgcattagttgaaaatgcacctggtattggtcaaagtttccctaaaatctctaaaaatgtagatgccatttcatcaatgatttatccatctcattggagcaatggagatttcggtttacaagcaccagatacggaaccatataaaacagttaatcgttatattcaaaaagaaaatagtttattagatacattaggtaaagataagcctatttcaagaccatggattcaagactttaccgcttcatatttaggtgctggcaattatattgattatgatacaaaagcgatatctgaagaagttcaagctttaaaagataacggggttaatgaattcttattatggaatgccggtaatgattatacagaaggtgttaattataatcctaaaaaaggtaatgctaaagaacaagaccctgaaggtgtagaacaaactaatgacaaagatgatcaacattctgatagtcaagataatgaacaagcggataataaaaataaataatatggagacaatttctcgtatattcatttagtatggaaatgatttatcttgtagactatttaaacgaaaggaatgcgtcagaattcattttgaattccttgacgcattcctttttttatttattagaaatgttcagtagataaataagaatgactatgatgtttttgttttagtaataatgaagttcccataactaatagaagtgaggctaaaagttgaattgagtgttgttgtgtatcgtcaccagtacttgggagtgttttaacagaagattgtgaggtttgagtatctttaagtgacttagatgatggcacctcagaagaagcaaccgttcctacataataacggttgagttcacgtgcacaatcaacagaattaacttgtttatgattagaagaggttgttttagcggctttagcgatacctgattctgcatgaatgcgtgtatcttgaagttgattaaagtcactatatctaccatttttgtactcaacttcgccatttttatgaactttatacattccattgccttcatttaatctattatgacttataatttcaaagtagtctcctttgtcaacagtacgacccaatcgttgtaggtttggattacctccactattagataatgcatctgtagcaatttgtttaacattatctttagtcactaagttagcaggatgtgcttctacagagtgagtcattgtaagtagcattgtacttgttaaaagtgtagatgcaacgaaagatactttcttcataatgaaaaccccatttcattcatgatcaattacaactagagtgtagcatttaaatagatcagaaacagggttttaaaaaaaatcataataaatctttaacttaacttaaagaataaataatttgtaaacattaaatcaatatttatcacatgatttatataggacattaatacttctttttagaaaaatatggaatagaacaagccattaaaatcataaaaataatatgagcaatcatccataaaccgtattcattccagctaaagtgaaagaatgaacgctttgccataacgacgagtgacggataaagagaggcaaaaacaatcattaataagacataacttattttatataatggtttaaagacgtgataaataagtaagaaaataaaatatattaaccatcctataaaaacatgaatggctagttctaataataacggcgttttgcttggatcaattaagaaatcgatgttaattaacaataaagtaagatgagtcgattgaactatgccatccatgatagtcattgtaattaataagataatacttataactaaagcactaagacaatgataaaaataacggatcataattttccttccttcttatatacatactataagaatattccctgaaatattagatttaacactttttaaatttttagaatattgaaaaaacatgttgaccaaagtttaaatcaatgataagttattaataattcaataatctattaactcttatcaagagtggtggagggatgtgccctacgaaacccagcaaccgtcattgtatgacatggtgctaattcacataaagttaatcatactttagaagatgagagaaagtgtgtcgatgctttctcttaatagttgaaagtatttttttatgtctttacatatctagtaagaggaaatgagaattgaaaatttataaaaaggtgtcaatacatatgaaaaaattaataggtatgatcagtattttgttagtaacgataacgctagcagcttgtggaaatcagaaagaagataataaaaaaattaccgtagcagcgtcgccagcacctcatggtgatgtgttaaaaaaagctaaggaagaaatgaagaaaaaaggatatgatttagaagtcaaagaagttaatgattataaggtgcctaataaattgttagataaaggcgatgttgatgcgaacttcttccaacatgtcccatatttgaatgctgaaaagaaaagtcatggttataaaattgaagaattagataaagtgtttacgacgcctatgggtgtatatagtaaaaaatataaaaatttaaaagacattccagatggatcgacgatttacgtttctaataatcctgcagaagaaggacgttttttatctttctttgttaatgaaggattaattaaattaaaaaaaggcgttaaaattgaaaatgcaaaatttgaggatattgctgaaaataaaaaacacttgaaatttaaccatcaacaaggtgcagagtttttaccaaaaacatataagaatggtgaaggagctgcagtcattataaattcaaactatgcgcttgataatggtttaaaaccgtctaaagatgctattgttatggaaggtaaatcatcaccatttgcgaatacgattgccgttcaagaaggtcataaaaatgatgaaaaattccaaacattattaaaagttatgcaatctaaaaaaatcaaagcgtatattaaaaaagaatatggcaatgatgttattccatacgaaaacaaataagtcataaaaggtctctattagaggccttttgtgatttatatttatcattgtttaaaagatagaaaaatatattttaatttttctgaaaatatttacaaatctgacaattattagtaagatattgattattatcacaagaattgaagtcaataaagaaagttagacataagttgttgatactttgggagaggatgagtcaatttgagtaaagcagaggatatgataaaagaagatagtaagtattttgctacttcaggacgtataaaatattatccattagtgattgatcatggatatggagcaactttagtagatatagatggaaaagaatacatcgatttgttagctagtgcaagctcacaaaatgtgggtcatgcaccaaaacaggtaacagaggcgattaaaaagcaagtagataaatttattcattatacccccgcatatatgtatcacgagcctttagtgaaactgtctaaaaagttatgcgatattgcgccaggtgattatgaaaaacgtgtcacatttggtttgagtggttcggatgcgaatgatggtattatcaaatttgcacgtgcttatacaggacgaccctatattatcagctttacaaatgcttatcatggctctacatttggagcgttatcaatgtcggctatcagtttaaatatgcgtaaatattatggccctttattaaatggtttttatcatattccatttccagataaatacagagggatgtttgaacaatctaaatcaaacactgttgaagagtatttagcgccattgaaagagatgtttgctaaatatgttccagctgaggaagtagcttgtattgtgttagaaacgattcaaggagatggtggattattagaaccagtagaaggctattttgaagcacttgaagcgttatgtcgagaatacggtattttaattgctgttgatgatatccaacaaggattaggtcgtacaggttcttggagctctgtggaccactttaactttacaccagatctcattacatttggtaaatcattagcaggtggattaccaatgtcagcgattgtgggtcgaaaagaaattattgaaagtcttgaagcaccagcacatctatttacgacaggagcaaatccagtaagttgtgaagcggctcttgctacgattgaaatgatagaaaatgacgacttactaacagttagttctaaaaaaggaaactacgtgcgtcaacgtatgaatcaatgggtagatcaatacgattacgtaggagatgtgcgcggtattgggttatctattggaattgatattgttaaagacaaacagtcaaaagaaagagctgctgaagaagtattgaaaatttgtaattactgttttgaacatggtgtagtgattattgcagttgctgggaacgtcttacgttttcaaccgccactcgtgattacttatgaacagttagataaagcgttagatgttattgaagaagcgcttcaagcactacaagatggcgatttaaatgaatatagtatagaaggacaaggttggtaaaatatattaaaagagcaagaaaagacgttaagtgaatgtcttttcttgctctttttcagtatacttcccttaaaaaacaaatgaatgtttctaaagggggtatgagaaatataagtgagttcattattttaatcttttggtacgacataatcatcttcatcattctttttagaatgtttaataccatagaatacataaatcacaataccaactaagaaccagattaatgtataaagtttagcttcaaaacttaatccccagaatacaagcaagactaataaaaaggtaatgacaggtaatacagggaagaacggtactttaaatgctggaactggtaaatctttgccttcacgttttcttaaactatacattgcaatagatacaaacataaatgcgattaatgtacctgctgaaattaattgagctaagaaagcaaatgggaacattgaaccaattaaaacaccgataatagtgagaataacaagcgctctattaggtaaatgtttatcatttaatttggctaaccaagaaggtaataatccgtcacgaccaaatgaataaagtaaacgtgaaccagctaacatcataccgattaatgctgtaaacataccgatgactgaaatagattgaactactgctgctactacaccatgtccactttgacgaagtgcccaaccaacaggttcagcattcccagcatattttgaataatggaacataccaactaatactaaagctactgctacgaataaaacaatcgcaatgattaatgatcctaaaataccacgtggcatcgttttttgcggattaatagcttcagctgagttggcagcaattgaatcaaatcctatgtatgccaagaaaatcattgatacacctgcataaataccttgccatccaccaaaatcaccagttgcagtgactttatgctcaggaataaatggaacataattacttgcttgaattgctgttaatccaacaataacgaataaaacaatcgctagaacttttaaaataacaagaatattttcgatacgagcagcttcactcataccacgagataataataatgcagttaaaataataacaattgctgcaactaagtctataattcctccatttgcaccaaaagggttagataaagacttaggtaacgcaatacctaaaggagacacaagtcctcttaaattggctgaaaaaccagaagctacaaaggcaacggcaataaagtattcggcaagtaatgcccaaccagctacccatccaaagaattcaccaaataaaacgttaatccaagaatatgcagaaccagcaaaaggcatggctgcagccatttcagcatatgaaaatgcaactaaaccagcaacaattgcagctaataagaaagataaagctacagctgggccagcatgctctgctgctactacaccaggtaaagtgaaaatggatgttgatacaatagtacctacacctaatgcaagaaaatctttaacacgtaaagtacgttttaaatgtccatctttattttgatagatagtgggatcttcttttctagtaaaatttttgaaaaaactggccataattatgaacctccactaataagtttaaaatttaattaattagcttgttagctatataacatttattatcatagcataaaagaatagtattttgtctaaaatttctaaaaatttcaatttttcttacttttaattaaacaagaatgcctaactagaaaatttaaatgatagatttgattatatcagataaatctaaaataaaaacaacaaaaaagagtatatttactctaaaaatataaaaagtagtaattatatcaatattggcactataattatagaagacaagtcaagtcattagacctttttaattgtgtcattttacaatggttaaagtatattgacctattccaatatggaatggttactatcgaaaatatgtattttattaatgtttcgatgcgtactataataagaaacgtaataaagttacaacgtattcaaatgttctaataagtatgtcttactatcattcccttaaacatgacatatataatagaaaactcccatctcatatttgaatatgtttaattaactgagattacacttcaactttaaaaattgaagttatttaaatataaagaagccgcaattaacatgtgactaagtctttccctctttttccctaaaaaaatagacatgtgtgtggcttctttttaattgggtataaaaaaatagaaaagtaattttgaaataaaaactttaaattacaaatgtaaacttgaaaggatatgaatataaaatggctaaagaaaactattctgccgcagatatggtcattgatactttaaaaaataataatgtggattatgtatttggtattccaggtgcaaaaatcgactatttattcgatgcattagaagatgatggcccagaacttatcgttacgcgtcatgaacaaaatgctgcaatgatggcacaaggcgttggacgtttaacaggtaaacctggtgttgcattagtaacaagtggtccaggggtaagtaacttaacaactggattattaacagctacttcagaaggtgaccctgtattagcaatcggtggtcaagttaaacgaaatgatttattacgtcttactcaccaagctgtagataacgctgcgttactaaaatcatcaactaaatatagtgcagaggttcaagatcctgaatcattatctgaagttatgacaaatgcaatccgcactgcaacttctggtaaaaatggtgcaagtttcattagtattccacaagacgttatttcatctcaagtgcaaagtaaagcaatcgacttaccagaaaaacctcatttaggcgtaccaacagatgaagaagtgaatgaagtgcttcaagcaattaaagatgctaaattccctgtattacttgcaggtatgagaagttctagtgaaaaagaaacagaagcaattcgtaaatttgttgaaaaaacaagcttacctgttgtagaaactttccaaggcgctggtgtaattagtcgtgaattagaagatcatttctttggtcgtgttggtttattccgtaaccaagtgggtgacgaattactaagaaaagctgatttagtagttgcaatcggttatgatccaattgaatacgaagcaagtaactggaataaagaattagatactgaaattatctcaattgacgaagtacatgctgaaattacaaattacttacgtcctaaaaaagaattagtaggtaatattgcaggtacaattcaaatgatgtcagaaaaagtatctgaaccaattattgatcaaaaacatttagatgacttagaagaattaagagcaaatattatcgaagctactggtattaaatatgaacatgaagatggtattttacatccagtagaaattattaatacaatgcaaaaaacgttaactgatgatacaactgttacagtagacgtaggtagtcattatatttggatggctcgtaaatttagaagttacaatccaagacacttattattcagtaacggtatgcaaactttaggtgttgcgttaccatgggctatagcagctgcattagtacgtccaaacacacaagttgtgtcagttgctggtgatggtggtttcttattctcaggtcaagatttagaaactgctgtacgtaaaaaattaaatatcattcaattaatttggaatgatggtaaatataacatggttgaattccaagaagaaatgaaatataaacgtgcagctggcgtagcatttggtccagtagattatgttaaatatgcagagtcatttggtgcgaaaggtatccgagtaacaagcccagaagaacttgaagctgcaattaaagaaggttacgaaacagaaggacctgttttaattgatattccagtaaattataaagataatattaaattatcaacaaatatgttaccagattctttaaattaattttctaaaaataggagtgaatattaatatgggtcatgtattatatcaacatggtacattaggtacattgatggcaggtttattagaaggaactgccacaattgatgaattattaaaacatggtgattcaggactagcaacacttacaggttcagacggtgaagttatcttcattaatggagaagcttaccatgcaaatgaaaaaaaagaattcgttaaacttaaaggtgatgaattaacaccttttgcaacaattactaaatttgaagcagatgaatcttatgaaacttctaataaagattctgaaacagtgttaaatgaagtaaaagaacatatgttaagtgataatttattctcagcagtaaaaatcactggtaaatttaaaaaaatgcatgttcgtatgatgccaaaacaagaaccaccatatacaagattaattgattcagcacgtagacaacctgaagaaactcaggaagatgttaacggtacagtgattggcttctttacacctgaattattccatggcattggttctggtggtttccatattcatttcgccaacgatgatcgtaatttcggtggacacattttagattttgaagtagatgatgtaaaagttgaaattcaaaactttgaaacatttgaacaacacttcccaatcgataataaaacgttcactaatactgaaattgattatgcagatatcgatgcagaaatcagagaagctgaataatatattatcattagagttcgaatcttttaagattcgaactttttttattttgataaaataatattttaagcaattcaatttaatggtataataatttcgaattttatgtttatggagatatataggatgcaatgttcaaattgtggtcatttatatcaacaaggagatttattttgtggagaatgtgagacaaaattagatcagattacactatctacaacagcaacatcagaattattaaacttggatagtcatgtaaacaaaaatataaatcactctacttcaaattctgttaattagtcaattcgatgattttggagtactacgtagattatttggaagtcgttttagtggcttattgtaagcattgtggaagtaaattcgtttcagttcaaaatgtatgtactcaatatggtacgtgtgtcattaatgaatttaagcaatcaccatctttaagaaataatataaaaaaatacagatagcaataaaaattttcaaagaaatagaagaatatgctactaaaaaagttcaagatatagtgaatcgatagtatctgatatatccttattgtataagtcccaaactaacaataatatataatattttataaggagaaatgagaaatgttaaatgctgaacctataattaagaagatgaaaaatcaaaaaatcaattatgataaggtattgaaaaaactgattagtcaatgggagcgtgaaggcgttcgtcctaaaattttattacatagctgttgtgcaccttgtagcacatatacattagaatatctatctcaatatgcagatattgctatttatttcgctaatcctaatattcatcctaaaaatgaatacttaagacgtgccaaagtccaagcacaatttgtaaaagattttaatgagaagactggacattcggtaaaatatattgaagctgattatcagccatatgaatttatgaagatggcgaaatcgcgtggtcttactgatgaacctgaaggtggaaaacgttgtacagcgtgttttgagatgcgtttagagcttgtcgcagaagcagcattgaagtatggatatgattatttcggtagtgcattaacattatctcctaaaaagaatgctcaattaattaacgaactcggcatggaagttcaacgattatacaatacatattatttacctagtgattttaagaaaaataaaggttatgaacgatctatagaaatgtgtaatgattataatatatttagacaatgttattgcggatgtgtatttgcagcaatggagcaaggtattgattttaaaaaaattaatcgagaagctaaaacatttttagaacaattttaaaaaggagtaagagagaatgagttaaacattctttcttactccttcgcttttatttataacgtacgatggataaaacgcacaatagctaaaatagcaataacaagggtagatagtagtccagcaatttttatgcctttcttctctttttcaggttcaggatctttattttccatcatttctaatagttcacgttcaatttcaagatccaaagctgttttcttttcaccattgtaaccgatactattatcgtattcttgagaagatttggcgtcttcaatgttatgcttatctttagtttgtgactctgtttgtttagtttctatagtcatcaatatgcccttcgatagtacatgctacgtgtaatattagtatagtgcactttatcgtttagtgaaataatttaacgtctagcatctagtccaataatctcactaatattactataatggtttgcttttaaatatttagcaatatctcgattaatctttttagttaaaccagggccttctatcacgagggatgagtagatttgtacaagtgacgcaccatttcgcatcatttgaatagtatcttgtgcactaaaaataccacctgtaccaatgattaaaaattcgccattcgtttgttgataagcccattttacaagttttaaattacgtttaaataaaggtcgaccacttaaacctccgtcttctactttatttggagaagataatccaccacgttgacgtgtggtattggctaaaatcataccatcaaaggtttctgtaatttgaggtaaaatagttttaaaaccttcaagttctaaatctgaagttagctttaaaaagattgggacattcacttcgtgttgtgctttataatctgttaaagcatgacataacattgaaaattcatctttatcatggaaactttgtaagttttcagtattaggtgagctaatattcacagtgaaaaatgatacatctgctttaaaggcatcgatgactttaatataatcttgataacgctcttcgtaaggtgtcgttttattaacacccacatttaaacctacaggaatagtgtaagcatgacgtcttaaattccataaagctttattcatacccatattattaaagcccatacgattgattaaggcatcatcttcaagtaagcgatacatacgcggtttaggattgccatcttgtggtttaggtgtaatgccaccaagttcaagagcaccgaaaccagcattttcaagtgctttaggcacttcacatgatttatcaaaaccagcagctaaaccaactggatttttaaatgttatccctttaatgttttgtgaaagagaggggtgttcatatgtaaataatttatttacaaaaggtagtaaaaaagcgtttttctgagtgaattttaaggcatctactgttaatccatgtgccttttcaggttcgattttgaataaaagaggtttaattaatttgtacataataatgctccatttcattgtatttgaggcttacgatcctcatttaatatcattgaaaaaacattcttttaatagactagcacgttcgcttaaaaatgaatagtctaatttgaaagtgtttgaaaaattgcctaactttatatcattttggaatgacaaaggttaaagcacatccatttaggtaatagaatagtagataaagaattggactaaggaggataattaatgaaatcagaatggaaaaatcaattacctttagaaggtattcaagatatttcaccagtaagcggtggagatgtaaatgaagcatttaaaattacaacaaacgatgatatatattttttattagttcaaagaaatcgtaaatcctctttctacgctgccgaaatagctggactagaggcatttgaaaaagcagatattacagcaccaagagtgattgaaaatggcgaaattaatggcgatgcgtatctattactcagttatttagaagaaggcagtaaaggcagtcaaaaagaattaggacaacttgtagccaaaatgcatagtcatcaacagtcagaaggtaagtttggattcgagttaccttatgaaggggctgatgtctcatttgataatacatggtcagagtcttggagtgaaattttcgtagaacgtcgtatggatcatttaagagatgaactattacgtaaaaatttatggaacgaagaagataataaagtatacgaacaagtacgttctgttatgattaatgaattaaaaaatcataacagtaaaccgtctcttttacacggtgatttatggggtggtaattatatgtttttaaaagatggacgtcctgccttatttgatccagcaccgttatatggagatagagaatttgacctaggtatcactactgtcttcggtggatttacacaagaattttataatgaatatgaaaaacattatcctttaggaaaaggagcagaaaaacgtttagagttttatagattatatttattcatggtgcatttagttaaatttggtggtatgtatgcaagtagtgtgaatcgctcaatggatcaaatattagcctaatagaaaacttcgggttaagtcttcttaatccgaagttttttatttcgtctttaatgaagtcatcatatcattagatgttaaaacgaacgatgaagtggatgaattaatgcataaagtggaagcattaggtggtaaggtgattgatgaacctaagacttctcaaggatattatggtgcaacatttgctgatccagatggacataaatataatttcttagtttgttagttcaattaattttataaaatacgccaattaatatacgccccaaagttagaatgagatctaatggtggggcgcatttttaatgaaaaagttatcatgaagacgtttttttatctttatatagattcatataaatgatagaaataatgattaaaatcgcgccggttatgaatttaggcgttaatggtaaagggaaaaacggaaaagaaaatataaatacaaatataggattgagggttcttataatattcgcttcacgaaacgaaatgtatttcaaaccttcataaaataataaaagtcctattacgccactacacaaagcagaaagtaaaatagagaacaagcctatgcttatatgtatggtatgtaaatgattagtcacaattaatatgatacctagcaacaaagtagaagtcgcctgattgtacagtaagatggttttagaatcaatgtctttgacggtctttttagctaacatattcgttagcgcaaaaaagaatgtataagatagggtggcaatcacacctaatatactgttaaaatcacctgaaaaatgagtaatcaagaatgaacctataacagcaaaaattataggaagggtatcgtttttgcacaacgtttcatttagaaagagcactgaaagaaacaacgcaaatataatataaaatcttcctaataatccaacactaactggatctaacaaacttaaacttacatattggagtaaaatacctattgtattagtaatacctaagagccatataaatttgttatgatagatttttattttacttttatcgagtaatacagttattaataatattaaagttgaaaacaaagcattaaaaaaacttgcttgaataggtgataaatcagtgagtgaaagtttgtttaatattggggttaaagacatgattgctacggaaataatattaaataaatacccttttttaactttattcatggtatgcccctaaatatttaaaaatttcttcatataacccatcttgaaatgataataactttttgtctaatggttctttcgtaagtattctttcagtagtttctgaatatttcggtatatctttaaaatagcttacttcagcttttgtaattgtagtggtatggccatttggtagtatatagtaacctaaatagtttatatcactttcattgatgacagcgccagactcttcataagcctctctgatagctgtctcattcatcgtttcattatggtttaccttacctcctgttaattcccatgctctttttttatttttaacaaacacaagatgtccttgataggttaaaacaattaaaacagaatcatattttgtaactgtctcattaaattgaagtttgatatgatttataatcatttatatctacctcctttatgaggtagatataactgtagaatccaaaatttttattaaaaacatttaatatttgatcaattgatgaaatcagtttaaaactgattgagtcgttcttaaaagtctttcgtagttcagtatttcgtgagactactttaaaaccatatttattagctatcttttctaaatcatttacgctatattccgtttgataaccaaatttccaaacttttaataaaatttttattttcttatctaaaataccaaacgaatatttatttggtgtcattaatataaggtgtccattagttttcaatactctatacatttcattcatgactttataagggtttagaaaatgttctataacacctaatgaaataactgtatcaaatgtattttgagggtaaggtaatttttgaacatctccaataacatacttaaatttgattccagttttaatcatatactcagttgcaatactttttgcattttcagaaatatcaataccatgtccttcaattttatatttctcaataagtttgaataggatggccccatccccgcatccagcttctaatactttatcgcctggactaaaataatattcattataaataaatgtttttaatttatcttttgctctttcaattcttgatggtgggaaattatatgattctttgttgttagaaaacttccatacattttcccaatggtgtttacttgatactttattcatagatgcaccttcttagttgttttatatattattatatatttattttatataatatcataattattatcgtgataagttatgatgtttgattctatacctgaatatatcttataaataaacatttgtggcttgaactattctacgatagactatgaaatatatttgttgagtggtatatagaatcagttgcataaacgaacataaatgagaaatcacttcattaagtagttttaattattaaaatcaaagaattactttatagtttccctaggaaagggtttcaacaaaatgagctgtgattcaattaagaactttactcaaaatatggacataaaaaatctgccctcaaagtcagaactttgaaggcagtctaagtcttgataataaaattttagttttcttgaatgttgccgtattcttctcttaaggcatacactttatctggtgtaacgtcttggccaagtggatcgacaactttcatcgttgagaacgtatgaagtacttgacctcttatcatacctaaatattcttgtcttaattgatgttgttcttgtttttcttcaacgctcaaactttcaactttttctttattttctaattgattaattctttctaataattctctcattatttcttcctcctaattggtatgagctggaaaatggggtgtaatatatgttccaacttcttctataagtgcttcgatatcacgatcattatttgtaaatcttaagataatatgatttgtattaatggattcataagcttttaatatttgtagtaaatttttacgtccagtacggaaaccacctttgattggtttaacggtttcgtttggattttgggataaatcaatcattaggatattcataaacggtttgaatcggtcagtcccactgtgccaagcttcaactaatttcttttgatcttgaaaaggttgagcgtaaaatagccaaccatccatatgttgttgtaaccaggagatggactgtcttgagtagcctgtaccaaacatcggaatcgtacgatgtttaggcaatacttgtaacccagaatcttcatataattcaaaaatcgaatttgaaatttggggtgaatgtgattgccaaagcgctcttaatgattgaacggttgtttgataacgttctgttaatgcactttcatctactttaaatgcagggaattcaaaagcgcgatcaccggtagccataccgagtaataaacgttgattggaaataagatcaagcgaggctgctgatttagctaaatggataggatgacgtagtgttgccacaatactgctggtcccaagtgcaatttttgaggtaaacgcacttaaatacgttaggaaaacaaatgggtcataattttcagttacgggtcctaaatgaggactataaagtggattatctctcacgaataaacttgtaaatcctaatcgttcagcttgttgtgcaaacttcacttgttcattaaaatcaatatgctctttatttttactatcaaatggtagggatagacctaatgttaatttatgatttttaaaggtacgtttaaaaccctcatgattttctatcttggacatatcacccctcctaactaaactttatctaaacaacactcataatctaaacaacaagtgttgtttataatataacgtaaataatcattttatgcaagtcgcatgcttttctataaaataacacttacaatcattaagactgtaagtgttgtttatagcattataaatttgtaatatggtgaagtaaaaatggtaagttttgatcaataaattgctcagcacttagttcacttgtatctaaccaatgtcttgctaatccacataaaccagcggctaaaaagcttgcgctattttcaataatactagaatcgtgctcgggatatttatgttgtaacatgagcgtaaagatatcttctaactcgttattaatgcatttatgagcatggttacaaaatgtctcacgattgagtttgcaagcattttgtacattttccaaataatatgctatcgagacaaataatttagagataatctgaccattgagcgtttctgaaatagacaacgtttctttaatatctttaagaatagtcattgataatgaataatctaatatttcatatttatcattaaagtgtgcataaaatgtagcccgattaacagtagcacggtcagtaatattttttactgtaatttgggtcatttctttttcttgtgacacatttagaaatgcttctacgagtaattgttttgtacgtatgactcttggatcaactttattgcttggcacaaagacacccctttcattttaaaatgtgattactttaaattattaaacgaacaaagaaggttgtcaaagagtatgattaatcgttctgttttaaactattataatagaagaaactcattttttctttttaaattacatacatattattggtcaaaattcttaaaatatccataaaaccagaaaaatttaagaaaatgataaaataaatattctgaaaatttagaaaatgtgttatagtattttttatcattacttaatacaacaacaaaatattataggaggtataagaatgacaacagaacttagaaaaataagcgttggagattttatttttagagtactttccggagtggctattgggattgtggtaggtttagtaccgaatgccattttaggtgaaatctttaaagcacttatgcatcaccatcctatttttgcaacattactacatgttgttcaagcattacaatttactgtaccagcattagtaggtgcgttaattgcaattaaatttaatatgactcctcttgcgattgcagtcgtatcaagtgcagcttatgtaggaagtggcgctgctcaatttaagaatggggcttggattattgcaggtattggtgacctcatcaatacgatgattactgcagcaattgcagttttatttattctacttattgaaaaacgtgtaggaagtatggcattgattgtttatccaacaattgttggaggtctctcagctacaattggtgtgctcatcctaccatatgtacatactataaatattgcgattggtaatatgattaatagtttcactgaattacaacctgtattgatgtgtatgttaatctcaatggtatttagttttattattatttccccattatcaacagtagctattgctattgccattggtattacaggtttagcagcaggttcagcttcaattggtatttcagctactgaagctgttttacttattggcacaagtcaagtaaatcgtgttgcagtgccaatttctattttttttggtggcgtgaaaatgatgatgccaaatatggtgaaatatccaattattatgttacctattttgattaccgcagcgatttctggtgtagtgggtagtcttatcggtattgctggaacaaaagaatctgcaggatttggatttattggcatgattgggccgattagtgcatttaaatttttacatgtcgattcagccgttatgagtatcctcctaattattattggtttttttgttgtacctttagtaacagcatttatactagatgttattttacgcagagtcttaaaattatttacaaatgatatttacaaatttatgggataaacgtattaagcctgggacatgatgaattgtctcaggcatttttaaatttaaatgataaacgtcaataatgttacaataaaatagaaaaaagattaaaaggatgaagggttaatggcgaaaaaaattgaagctttagcattaaaaacagcagaattaacacgacgtacacatgaactaggcattccagtgatgatattatttgaaggtgtacctgcatctgggaagacgcgcttatctaatgagttattattaaatttagatgcgaagtatacacaatttattgcgacacagtcacctaaacaggatgatttaagatatcaatttttacaaaaatattggaataccttacctaaaaaaggtgatataaatatttattttagaagctggtattctcattatctagattatagagaaaataaaattaaacacgacaaatataaaaactatgatgtactcaaacaacaaatttcttcttttgaaaatatgcttaaacaagatcactatgaaatcattaagtttttcatagaaattaatgaagaaaagcgtcaagaacatattcaacaaaccaaagataacccattgacgcgttggaaagttcaagaatatagtaatgtacttccaacagatatttaccttaaagatatgcgtcaatttataaaaaatgataaagcatgggaaatcattgattataccgaaagagaaaaagcaatcgaaacaatgtatgaacatattatcaaacatcttgaaacagcgattgagaagcatgagcaaaaagaagaacagcgagacggtaaatttcattctaattttaaaacacacctttttgatagaaaggtggataaagtaaaaaaagatgaatataaacagctcatcgaggaattacaaaatcgtatgagagaaattcaattcgctttatatgatagaaagattccgcttattttagtatttgaaggtatggatgcagctggtaaaggtggaattattaaacgaattagagaaaaattagatccaacgggttatcgagtgaatgccattagtgtccctacagatgttgaattaaaacatcattatttatggagatttgcgaaggaaatgccaagaacagggcacatcgaattattcgatagaagttggtatggtcgtgtattggtagagcgtgtcgaaggttttgctactatcgatgaatggcaacgtgcatatgatgaaataaacgcatttgagaaaatgtggacagatgaaggagcgattattttaaaattcttccttacattagataaagaagaacaattaaaacgttttaaagatcgtcaagaaaatgttaataaacaatggaaaattacagatgaagactggcgaaatagagaaaaatgggatttatacgtggaatcaagtcacgatatggttgagaaaacaaatacatcctatgcaccatggcttgttgtccctgctgatcataaaaaaacctctcgtattgagatactaaaatatattattcgtaattgtgaaaaggtactttggggagtaaaagattattaaaaataaataaggaaatttaatacgtgcaagctcttgttttttatcaaaagtaaagaatttaaatagccaattacattttaaaaatattacagtaatgtaacaaaacattaatttgtaatatgactaatgacgttaaagtattgtaaattttgtaagaaagtattgtaaaacgttaatttataataaaaataaactccatattgatagtttttttatattacaagaagtaattaatatgtttcaatattacaaaatgatggattaattgtaattttttgtaaaacaagtgtaatactattctacaaattttgtgttatagtagctattgtcaaaagttaaataacaaatcaaaacagaaattaatcttaaataaagaatgaaacataacgaaaatatatatttcaattttggaggaattatctattatgaaaaagacagtaatcgcttcgtcattagcagtaactttaggtttaacaggatatgctttaacaaacgatcacagtgcacatgcatctgaacaaacaactaactattctcatttagctgacttagctcaaaataacccatctgaattaaatgctcacccagtacaagctggtgcatataacatttcattcgtaaaagacggttttaaatataacttcacttcaaatggtaacacttggtcttggaactacacttacgctggtggtgctgacacagctcaatcaactactgactacactgagtcttataatcaagcttcaactcaatcagtaagttcaaataatcaagctagcacttcaaatgtaaaagctgtttcagctccagtacaaagaacttctagctacaataactacagtgctcgtacaacttcatactcagcaccaaaaactacttcatactcaactgcttcaactggtggatcagttaaagctcaattcttagctaacggtggtactgaagctgcttggaatgctattgtaatgcctgaatcaggtggtaatccaaatgctgttaacccaattggttacagaggtttaggtcaaactaaagaagcatggggtactggttcagtagctacacaaactcaaggtatggctaactatgctaaatcacgttatggttcatgggatgcagcaattgctttccgccaaggtcacggttggtggtaagatttaagtagataactggataggacatcgagttattaaaaaaggaggacgacaatgtcgtcctcctttttttattttttaatataatatttttaatttcttgcttagtacatatcaaactactttcttttaatgattaattattttaattataattaatataactatattgaaagagggtgatatgaattgagtataaacaaaatagtgaaattaggattatatcatagtgtatattggtcggttactcaaatgtcgctatctcacttatttacaaaagtgcctcgttctttttttgatacatatcatcattggtttaaaacatttccatttgaacaaggtgggcagttatggaatcgtctttttcttattaatagatggaaagggtatattccagaaggagaatgcctaaataaaaatgtttataataagcatgttttgaaaccactaactcaagaaagtgtttataaaatgattatcgaaatgagacgagctgaattagtacattggctttctatattgccagttattgtctttgtaaaagcacctaaatgtattaaaacaataaatatactatatgctttattagcaaatgtaccgattatattgacacaacgttataatcgaccaagattagagagatattaccaattaaagtacaagagaggtatggatgatggcgaataaaacaattgtcgttattggcggtggattaggaggtatatcagctgctatacgtttagcgcaaagtggttatcacgtagatttatttgaaaaaaatacacatataggtggtaaagtgaatcgattagaaaccgaaggatttggtttcgatttaggcccttctatcctaactatgcctcatatttttgaaaatttattttaccatagtaataaagaaatggcagattatgtgacaattgaacgcttaccacttcaatggcgtagtttttttacaaatggtaaagtgattgacttatatgaagatttagaacagacggaaaataagaatagccatttaacagactatgatattcagcaattatctaattttctaaattatgcagaaaaaatacatcgatttactgaagatggatacttcgctttaggtttagatacggtaacggacattcttaaatatcagggtccttttaaatctttaaaaggtgtagattatttttcaacaatgcaacaagcgattaatcgatatataaacaaacctgaacttcaagatatgttaggatattttatcaaatatgttggatcgtcttcatatgatgcacctgctgtattaactatgttagtacatatgcagtatgaacaaggattatggtatgtcaaaggtggtattcatcatttagccaatgctttagaacgacttgctgaagaagcaggggttcagattcataaaggtattgacgtaacaagcattgatacctatttcaatcaagtcataggagtaagacttgataatggtcagcacattcatgctgattacattgtctctaatagagaagtcataccaacgtatcgagatctacttcatttttccgataaaaagttggaaaagttagaaaaaacatttgaacccgctagttctggttatgtgatgcatttaggtgttaatacatcttatcctcaattggctcatcacaacttcttattttcaaataattctaaacaaaattatcatgaagtttttcatgagaaagtgttaccacaagaccctaccatttatctcgttaatagtaataaaacagacaaagcacaagctcctaagggatatgaaaatttaaaagtactaccgcatattccgtatatccaagatcaaccgtttactaaagaacaatatgatgaatttcgagaaagagttttagataaactagaacacatgggtttaaccaatttaagagaacatattatttatgaagatgtatggacacctcatgatattgagagcaattacgcatcgaatagaggtgccatttatggagtagtggcagataaaaagaaaaacaaaggttttaaatttcctaaacaaagtcaatattttgataatttattctttgttggcggttctgtcaacccaggtggaggtatgccaatggtaacactgagtggacaacaagtagcagataaaattaatgccatagaagagacgaaattattaaaatatcagccttaaggagacactcaatgatgaaacgattagctaaactattatacccattactcggtgcttcaatagcgagcggatactttatgtataatcgtcaacgactacttcaatataataaaaaaacaactaagaaaaattatccatctatcagtattattattccggctagagatgaagaagttcgattaccacgcttattgacgagcttaaatcaacagtctatctctccagaaattattgtgatgaatgatggatctaaagataatactagagtagtagcattatcttacggtgctaaagtaatagatgtcgtagaaggtgacgatgcacgatggtatggtaaatcgtttgcttgttatcaaggtgttcagtatgcaacgtcagatatttttatctttatagatgctgatgtacagctattagattcacatgctttagaatctatattacaagcttatgaaaaacaatcatatcgtggactattaagtattcaaccctatcatctcgtcaaaaaagcatatgaacagttttcagctttatttaatttgatgacagttgttggaatgaatcaattttcaagtttatctcatcataagcaaacattagcatttggtccagttacagtaatgaagaaagaggattacgttttaacccaaggtcataaaaatgctgaatgtcatattattgaaggatttgctcttgctcaagctttctcgaaatataatctacctgtatcctgttatgaaggtaaaggttttgtaggatttagaatgtatgaggaaggggctaaatcactgatacaaggttggacaaaacattttgcgactggtgcttctggaactgaaggtacgataatgttgatgattatgacatggatgatgggaataacatttagtcacaccttattgttgctcagttttattacgaaaaccgtatcaaaaaaatggggaggattatcttacttcttatatcttattcaatttataagactacataagcgtgtagggagtttttcaatattatttttaatcatgaatccattattatttatagtgtttgtatttgtatttataaattcatattgtcagacacattttactaaaaacgtaagatggaaagggcgcacttttaaaattaattaaatatgtaaagtataacagggggacgcttcatgagttttgtagaagaaagttatcagtactgtcataaaataatgaaagattattctaaaagtttttcatttgcatttgatttattaccagagcgacaacgacgagctatctgggcgatttattccgtttgtcggattattgacgatagtattgatattcatcaagatgtcgattatttatataaaattaaacaggacgtaaaacgtatcgagcgtcaatcagatattcaaaaatcgtttgaaagtgatcaacatattatgactgcttttgcagatacagctcaaacatttccaatgaattactatgcattatatgaattaatagatactgttatgaatgatcaatcctttacaatgtttgatactgatgatgccttaatggagtattgttacggcgtcgctggaacagttggtgtattacttatacctgtattatctacttctcctacaaaagaaacatatgaaaatggaaaacaactaggggaagctttacaactaacaaatatacttcgagatgtaggtgaagattatcacaacggacgtgtttatttaagtatcgaacgattagaacaatgtggcgtatcaatggatgatgaaatgaatagtggcccttctgaaaaatataaaaaattgtgggaatattatgcaacgattgcggagaatgactatgaagcggtacttaatcatctagatgtgtatgacaaagaagcacgttttattatagaattagcagctcgcgtatataaaagcattcttgatgagacaaggaaagcgaattacacatttagtcagcgtgtttacgtttccaaatggaaaaagaatcatatttatcgtgaattaatgaaagaatataaagtaaaagaataggtgggaagtttatggatattgccgttataggcgcaggaatcactggattggcgtcagcagcacgattagcttcacaaggacatcatgtgacaatatttgagaagaatggaaaagttggaggaagaatgaaccaacttaaaaaagatggttttacttttgacttaggtccaactattgttatggtacctgatgtatataaagctatatttgaggagtgcggcaaacactttgaaaattatattgatatgcaccaattgtcacatatttttgatatctatttttcagataaagataaagtaagtgtctctacagatttacctcaattaagtcagactttagaagcgattgaaccaggttctacacatggatttatgtcatttttaacagatgtctataaacgttatgacattgcacgtaagtatttcttagagcgcactttccgcaaaccaagtgaattttataatccgattgctttatatagaggcatgaaattaagaacacttggtaaagcaaatcatcttattgatagctatgttaaaaatgaaaagattcgtaaattacttgcttttcaaacactatatatagggatcgatccaaagcaaggtccttcaatttattcaattatcccaatgatagaaatgatgcatggcgtatattatatcaaaggtggtatgtatagctttgctaaaggtcttcatcgtcttacacaagatttaggagtcagtattgaattaaattcagacgttcaagaaattattatagaccctaaatttaaacgtgtggatggtttaagagtgaacggagatattcgtcgttttgataaagtattatgtacggcagacttcccatatgcagcgcaacatcttatgccaagtcattctccacttaagaaatatacacctgctaagatagataaaatggattattcatgttctgcatttttaatttatgcaggaataaacagagatttgaaagataaagttcatttgcataatgtgatttttgctgaagattttagagggaatattgacgatatctttgaaggaagattgccgaaagacccttctatatatctttatttcccctccgttgaagatgaggaattggctcctgaaggaaaaacaagtatgtacattttaatgccagtacctgagcttaaaacaggtcaaatcgattggaacaatccagccataattgaacaggttaaaaatgaaatttacaaaaaaacagaaacaattgaatcacttaaaggattacgtaacgatatcgtatccgaaactatttttacacccttagattttgaaacacattataatgctaaattcggtacagcctttggattaatgcctactttagcacaaagcaattattaccgtccgcctaatgtgtcccgtgattataaagatttatattttgcaggcgcaagtacacatccaggcgcaggcgtacccattgtattaacaagtgctaaaataacagcagaggctatgttagaagatataaaaaatatgaaatagaataaataaatctgaaaattgacaattatcagtgtaatgttaaaataagacttaatacgtaagaacttatcgagagaagtgaagggatttggcccaatgaaacttcagcaacaggcttcataaatataaagtactgtgctaattccaagaggataataaataacctcaaagataagtgacatatatcttatgaagctatatgccacacaaaagtggtatatagctttttatttaaggaggaataacatggttatttcaaaaagattagcagccattcctgatagctattttggaaaaacgatgggccgtagagtagaacatggccctttaccacttattaatatggcagtaggcattcccgatggtgaaacaccagaaggtattattgagcatttttctgaagcgattcgctttcctgaaaatcaaaaatatggtgcctttcatggtaaagaatcatttaaagaggccattgttaatttttaccaacgtcagtacaatgtgacattagataaggaagatgaagtatgtattttatatggtacaaaaaatggattagtagcgttacctacatgtgttgttaatcctggagaaaatgtgctacttccagatcctggatatacagattatttagcaggagtgatgcttgcaggtgccaatcctgttccattaaatttagatcctccagattatttgccaaattgggataatgtagataagagagtactagacaacacaacgcttgtttatttaacgtatcccaataatccaacaggatcaacggctacaaaagaagtatttgatgaagcaattgaacgattcaaaggtacaaagacaaaaatcgtgcacgactttgcttatagtgcttttggctttgatgctaaaaatccaagcatacttgcttcagaacacggtaaagatgtcgccattgaaattttctcactttcaaaaggatataatatgtcaggtttcagagtagggtttgcagtaggaaataaagacatgattcaagcattaaagaaatatcaaacgcatacaaatgctggaatgtttggtgcgttacaagatgcagcgacgtatgcacttaatcattatgatgaatttttagaagaacagaatgaaacatttaaacggcgtcgagataagtttgaagcaaaattaagtgaagcccatctaccatttgtgcattctaaaggcggtatctattcatggttacgtacacctccagattatgatagtgaaacctttgaacaatatttattaaaagagaaatctattttagttgctccaggtataccatttggtgaaaatggaaaacattacgtgcgtatctcacttgcattagacgataaatggttagaagaagcagctagtagattaatggacctagctgatatgtataaagcaaagcatagttaaaaaattatgaaggaagatgatcaatatatgaccaaaattaaaattatgagtgtaagagatgaagatataccatatattaacgagtgggcgaaacaaaacaatgttgatgttgatttaaccaaagaaatgttaacagagacaacagttgatactgtaaaaggatttgatggtctatcgttatctcaacaacatccaatttcagaagaggtttttgcgaaattgaaacaatatggaattaagcaaattgcacaacgtagtgcaggatttgacacgtatgacttagatttagctactaaatacgacatcattatctcaaatgtaccctcgtattctccaagttcaattgctgaatttgctgttacacaagctatcaatattgtaaggtatcaaaaacgtattcaacataaagtgcgcaattatgattttcgttgggaaccttctatattatcacaatctatccgagatttaactgtggcagtaattggtactggacgcatcggttcgattgtggcagaaatttttggaaaaggttataacagcaaggttgttgcttatgatccatttccaaataccgctttagcaaaatttgttgattataaagatacattagaagcagcaattaaagaagctgatattgttaccgtgcatattccagctacgaaatataatcatcatttgtttaataatgttgttttttcaaactttaaaaaaggtgccgtatttgtgaatgcggcaaggggatcaattgtagatacacaagctttactttctgttatagatagtggtcgaattaaaggggctgcattagatacatatgaatatgaaagaggattattcccaggtgattatcgtggaaaagagatagatgatgtattgttaaagcaacttatcaaaagagaagatattattttaacaccacatattgctttctatacagaagcggccgtcaaaaatctcatagtagatgcacttgatgcaactatggatgttttaactagtggtacgactaaactaagagtaaattaaaataaaaaaagttggagcgttacctccaacttttttattattctttaacatcatagccttgatcttcaatagtatcgtgtaaatcttttgttgaaacgagttcatcattataatctacacgaacttcgtttttatcaaggtctacttcagcagttcttacaccattaattttagctaatgctgattcgattgtatttttacaatggtcacaactcataccatctactttaatgactttattaatcattgattatcacctccgagtacttcataattactatacccatattttacgctttttaaatttttatgaaagtataaagtttaaaattcatttataatttcattcgttttagacgtaatgcattagttacaacgcttacagaacttaatgccatcgctgcaccagcaatccatggagcgagtaagcccattgcagcaataggaataccagcagcattataaccgaacgcccaaaaaagattctgtttgatgtttcgaatggttttatgacttgcgcgaatcgctttaggaactaaggcaatgtctccacctaagatagtaatatcagccgcttcaattgcgacttcagtacctgttcccatggcaataccaatatctgcttgaactaaagcaggtgcatcattaataccatcgccaaccatcgcaatgttctcacctttatcttgaaaatgagcaacatgtttagctttatcttccggaagaacattggcgatcacatgatcaataccaacttcatttgcgatagcttgagctgtagagtggttatcacctgtaatcattaccgtacgtaaattcatgtcttttagttcttgaaccgcaactttggcttcagatttaacagtgtctgctacagcaatataaccacgtaatatctgatcatatgcaatcaacatgacggtttgtcctttttgttcaatttgggtgatttcatctaataaagatgttgtatcaatatgatgatttgacattaatgaccggttgcctatgaataatgtcttattattgattatagctttaataccatgacctggtaatgtttcatagtgctctatatatgttaaagtaagctgttttgttttagcgtacttaacaatcgcggttgctaaaggatgttcagaattattttcagcagaagctacatatcgtaataaagtatcatcacctttaaagtaagtcacttctggtgtaccatgtgtcaacgtacccgttttatcaaataccactgtatcaatttgatgagtacgttctacatattcgccacctttaaacaagataccttcttctgctgcacgtcctgtaccaaccataatagaagttggcgttgcaagtcctaatgcgcatggacaagcaatcactaatacagagatcatggcaacgagtgcatcttcaaattgaccaggatgaacgaaaataatccatatgataaagacgagtacggcaataccaataacaataggtacgaaatagccagaaatcatatctgctaaacgttgaataggtgcctttgaactttgggcttcttcaactactttaataatattagataaagcggtatcttgacctacttttgttgcttgaacggtaatgacaccatttttatttagtgttgcaccaatcacttcattatcaactgttttatctataggcatggattctccagttagcatggattcatctacggttgttgtccctttaatgacttttgcatctactggaattttttctcctggtttaacaagtaatgtgtctccaacttgaacattttgaagcggaaccattgtttctgttccatcatctttaatgagacgtgcttctttggcttgtaaatttaataattgatttaaagcatgtgttgtttgtgattttgcacgtgcttctaaatacttgccaaataaaattaaagtgattaaaacagcactggtttcaaaataaaggtggggctgtgcgtttgagtctaataaccatttactcatttcataaatactatagaaataagctgcactagtaccaagtgctacaagaacatccatattggcaccaccattacgtaaattcttgtatgcgccaacataaaattgccatcctataataaattgaatgggagtggctaagataaattgaaaccaaggattcataaatatttcaggtaacggtacattaaataaatgaacaagcatagttaaaagtaatggaaaagctaatattgctgaaataatgagtttattacgttttctttttaattcttgaactttacgagaagcttgctctttttttgattgtttaggtttagcatcatagccgagatgttgtattcgtccaatgagcgtatcaacatcagtttgacctggataataatcgattgttgcttgttctgtggttagattgactgttgcttgcttaacgcctgttgttttatttaatactttttcgatacgattagaacaagcagcacacgtcatacctataacgtctagttcacttttatctgtttcaacgtcatatcctaatttttgaatcgttttaataaaatcgcttacttcatattgatcgttaggataatcaatggttgctttttcagttgctagattcacttgagcatgaacgccttctattttattcaatcgtttttcaatacgattagaacaagcggcacatgtcataccaatgatattcaaggtgatttgatgattttgagtcatatgttcgacctcctaccaccttcaatatacccccttagggtatattagtcaatgatcttgcttaataaaaaaagaacaatgttactctaaataaaatgagtatattgttctcttattcataatagctattcatattaaaagaaatcagagggtttaaaatggcttaaatctaaatctttaaaattattgaagttaggatgagtgatagatcgtacaagttcaccacttttagcttcattatagtaatggttggcttcattcattaaatcatgatcttgaactgtttttacaagccctaaaatgataagaatggtaatgataccctttagaatacctttcatgttgtaacactcctttttatctttatctctatatgagtcgttgtttagattaattatattataaaaactctatgttaaaatttcatgcatctctagtacggactttgtatcattcaaaagtagtaagtatagtcattttgttttaaaaatcaaagaaatgggaacggttaagtaaataaagaaggagtgaagaggtatggacttattagattttcataaaaaaattaaaggttatacacaagaaaaacaaccaggttctgaaaaagatatggatcctagacctattgctgaaatggaagaatacaaagctggcggtaaactaaaaggaaaagtcgcattaattactggtggtgactccggtattggtcgttcagtagctattttatatgccaaagaaggcgctgatgtcgctattggttattataatgaacatgaagacgctgaagataccgtcaatcgtttaaaagaaatcggcgttaaagcaaaagcatattctcatgatttaaaagatgctgatcaatcaaaaaaacttgttgaaactgttgttaacgattttggtggtctcaatatattagtaaataatggtggcgtgcaatttcctaatgaagactttttagatattaaaccagaacatttcaatgaaacatttaaaacaaatatttttggtatgttcttcttaacacaagctgcagtacctcatttaagtaaaggtgatgcaattgttaatacaacaagtgtaacggcttatcgtggttctggtcaccttattgattactcagcaactaaaggtgctattgtgtcgttcacacgttctattgcaacatcattgatggaaaaaggaattcgtgttaatggtgtagcgccaggtccaatttatactccattaattccatcaacatttgatgaagataaggtagaaaatcaaggtggagatacaccaatgggtcgacgtggtcaacctgctgaacttgcgccagcttatgtattcttagcaagttatgcagatagttcttatattacaggtcaaattatccatgttaatggtggcgattatattacgtcttagtatgtagtacttatgaagataataaagtattctgtctacgtatagcgtagggagaatactttttatatttatagaaagaaaagaggaaaagacaatgactgaaaaagaaaaaatgttagcacacgaatggtatgatgcaaactttgataaggaattaagaatggacagacaaagtgctaaagacttatgctttgaatataatcatacacgacctagtgatatagaaaaacgccaagcgattttaaaagaattacttggctatgaagcgaaacaactttcaatcagcagtccatttgacacagattatggttggaatataaaagttggagaaaacgtgtttatcaatagcaatagttatttgatggatggtggtggcattacgatcggcgataacgtctttataggaccatcatgtggactatatacagcacatcatccactcaattatcaagatcgtaataaaggatgggaattggcaaaacctattcatataggaagtaatatttggtttggtgcgagtgtgacagtgacaccaggtgtttcaattggtgatggctcagttattgcagcaggtagtgttgtaacaaacgatattccaccgaatagtttagctgctggagtgccagcaaaagtgataagaacgattgatcaaaatgaaacgataaatatacctaatcactttgaataatatagtaaccaacctttaagcagtaacacgtatgcttaaaggttgatttttatgtaaaataacaatttgtattgaaattaaatatttattatataatataattaaatgatataattgtagagtgctgaatgtgtgtattactatatgtgcatcattgaaatagttcaattcattttaatgaaacaacttaagagaaataaaagcaacttagaaaggataatgaatatgacacttaagacatgtcttacaaatcaattaagacgtaaattgaattttttatttaagccaatacaaagaaaaaataaatctgcttatacaagtaaagtaatgacttacgctaaatattataaaaaaaataacgttaaggaatatcagatactatatcaagtgagagatggaaaaagtatcacagatagtccatatgcaatatttaaaagtttaattcaacaacctcgttatcgtaaatataaacacatatgggtagtagatcatcacgaaacattgctattttataaagcaaggtttaagtactataaaaatgtagagtttgttattaaagaatcaagagaatatttgaaagcattaacggagagtaagtatttaattaataattctacttttccatcctatttcattaaaaagccaaaacaaatgtatatcaatacatggcatgggacacctttaaaatatatgggattagacattgaaaatagtctttatggttctcaaaatattattaaaaactttttaagcagcgattacttaattagtcctaatcaccatacgacgacgatttttaaacgagcctttagacttgaaaatatttatggtggagaatttttggaaattggatatcctagaatcgatttaactttaaattcaaatcgaaaagacatgattagcgagttgaatcattatcttcatattagtaaagaacaaagtattttattgtattgtccaacttggagaggcgaggatgtcaatgcaccagaggcaactttaaatcatatcgttgaagaagttgaaaaacttaaacatcatctagattatcaagtgttagtcaaagtccatccttatttatataaagacgcgcttaaaataaaacgtttaaaaccttatttaattcctgattattttgataccaatgaaatattagcgatcgtcgatttaatgattacagattattcaagtatcttctttgactatttagtaaccaataaaccgattgtcttctatactccagatttggatgaatatcaatcgtcacgaggtatgtatattgctaatcgtgacctacctggtcctgtcgttcatcatattgaagatgtgattacagcgatcaagcaaaaagtatatgatgatgattcagtaaagaaaaaatatcaatattttaaacgtcaatatacctatctagatgatggaactgttactgaaacacttattaacatactgtttgagggtaaacgtaagcgtcctaaacgtaagatctgtgctaagaaaagagtgttaatttatcctggtggtatgaaaaataatggtattacaacgtctatcattaatttattagaaaatgtcgattatgaaaaatacgacattacattgtttactaataaaagtaaaaatcttgaagttttaaataacttaaatcgtattaataagaacgttagaattattttgagagtacctccattagcagcatcattgaaagaaatgtatagtatcgatttcgtaagacagagaggattaaaaagtacgttagaacatttgatatatccgaagaaagtatacgaaagagaaatgcgaaaagtatttggtcatagccaattcgactatgcgattgattttagtgggtattctatgttttgggctaatttaattttagcaacaaaagtaaaacgtaaattgatttatttacatagtgatattaaagcagatatggaaagaaaagttaacggtgttaaaatacattatcaaaatttaaaaggtgtactctcgctgtatagtcaatttgatcaattagtatgtgtatccgatgcttctaaagatcaaaataaacagaagatcaatgataaatcattgaataagaaatttgttacttccagaaatacgattaatttgaataaaatcaatcaactaaaattagatgactctgaaaaatttgaaaaacaacaccaatccgtactcgtacgcatcaataatagggatataagttcagtaccatttaaggaagacgatttcaaaattgtaactgcaggacgattatcacctgaaaaaggttttgacttacttattgatgcatttagtaaagtacatgtcagtcatccgcatacaaagttatatattatgggggaaggccctatccgtgttcaattagaacaacaaataaaaaggttgaaattagaaaaacatgtctttttattaggccaaaggaagaatccatactatatcatgaaacaagcagacgtcttctgcttaacgtctcattatgaaggacaatcaatggtattacttgaagcattaactttaaaagttcatattatcgcgtcagatattatagcaaaccgctatgtactcggtaatggtaaatatggtactcttgtgagtcatgatattgatgatatcacagtcgcattagaacagtgtattcaaaaacgaccatctcaatatgaagtatttaacgcacaagaatataatcaattagcacttaaagagttttataaactactcaaatagtaaaaaacggttagcatattaataaaagctaaccgtttttctattaaatagtgatgttgttatgtttattataagtcaaataagctgtaataccttcttcaatactatatttaggattgtaacctaatgctttgagcggggtaatgtcagcacaagaatgtttaatatctccaagacgtggagcttcaaattgataaggtatatgataatcaaagccatgttcgaacgattgaaaaacagctttcaaatttgtttgtattcctgtgcctacattatagataaaaccatccgttagagtagtattaagaacaattgatagaacattgattaaatcatcgatataaacaaaatcacgtgtttgttcaccatctccataaaatgtaaaggttgaatgatttaaaaacttagtattcataatagaaatgactcctgaataatcagatgttggattttgtctaggaccgtaaatattaaagaatcttaaacaagtacaaggaatttgatataaatgattataaatcttagtatattgttctccggcatacttttgaatagcatatggagataatggaaatggtttcgattgttctacagatttaggtaaatcgggtagatgaccgtaaatagctgcagaagaagcaaatatgacttttttaatatttggattatatattcgaattgcttctaatatattgacagtagcatctatattaatacgattggataattctggtttttcaatagtttctactacacttaccatagcagctaaatgaatgacaaaatcaaattgttctttttgtattaactgtgtgacaaattcaaaatcggtgatgtctttgatataaatatgttcattgttcacaaaaggtatattctttaaaaagccggaacttaagttgtcaataatatgtacttctgtgtcatgtttcataaaatattctgctacatgggagccaataaaacctgctcccccagtgataagtactttcatataaatacttccttttctagatgtcggttaattatgttgtgattattatactttattttatttaaattataaattatttatataaaaaatgtactgatagggctatattggtatttgaagaaaagtttaaacaaacaattttgtaagcggttgcaaataagggagtaagcatagtaaaatgaagttaatgatagaaaatatcatgattaagaaacaaagggttagagaatgaatttaaatatttaaaaacatatagggggtaatgaagtatggtagtacctttcaaaaatgaacctggtattgatttttctgtacaagaaaatgttgaaagatttcaaaaaacgttagaaaaagtaaaacatagcttaggccaaacgcttcctattgtcattgatggtgaacatatcattaaggatgagacattcgattcaattaatccagcgaatacatctgaattagtagctaaagtgtcaaaagcgacaaaagacgatgtagataacgcatttgaatcttcaaacaaggcttatgacgcatggcgtaaatggtcacacaaagatcgtgctgaattaatgcttcgtgtcgcagcaatcattcgtcgtcgtaaagaagaaatttcagcagtcatggtatatgaagcgggtaaaccttgggatgaagcagttggagatgcggctgaaggtattgattttatagaatattatgctcgttcaatgatggaacttgcagatggtaaaccggtcttagatcgtgaaggtgaacacaatcaatatttctataaaccgattggtacaggtgtaaccattccaccttggaacttcccatttgcaattatggtgggtacaacattagcaccagtggttgcaggtaatacggtgttattgaaacctgctgaagatacagtgcttactgcatataaactgattgaaattttagaagaagcaggcttacctaaaggtgtggtaaactttgtgcctggtgatcctaaagacattggtgattacttagttgattctgtgcatacacattttgtgacattcaccgggtctcgtgcaacaggaacacgcatttacgagcgtagtgcagttgtacaagaaggtcaaactttcttaaaacgtgtgattgctgaaatgggtggtaaagatgcaattgtagtagatgaaggtgtagatacagacttagctgcacactctattgtaacgtcagcgtttggattctccggtcaaaagtgttcagcatgttcacgtgccattgtgcatagcgctgtttatgatgaagtcttagaaaaggcaattgagttaacaaaagatttaacagtaggtaatactgttgataatacatttatgggacctgttattaataaaaaacaattcgataaaattaaaaaatatattgaaattggtagtaaagaaggaaaaattgaaattggtggagaagcggatgattcaacaggttactttatccatccaacaatcatttcaggattaacatcttctgatcaagtgatgcaagaagaaatctttggccctgtagttggcttcaccaaattcgataactttaatgaagccattgatattgcaaatgatacagattatggcttaacaggcgcggtcatcacaaacaatcgtgaacattggattcaagctgtaaatgaatttgatgtaggtaacttatatctaaatcgtggatgtactgcagctgttgtaggttaccacccatttggtggtttcaaaatgtcaggtacagacgctaaaacaggcagtcctgactatttattaaactttttagaacaaaaagtcgtatcagagatgttctaacataacgaagtggtaggtgctgtggaaagtcgaattcgttcgattttccatagctttttttatagtctcaaaaaaataaatacgctaaacaatgtatgagtcatatctaaaatttatgaaaaatgaataaataaataattgtaaaagtaagtgaaaaaggttatcatttaagtgttgagaatgattattaattacaaatagaaagtgtgactggaatgataaatgtaagcactgcatcaaaagataaaaagtatgtagttaaacaaattgatattcaaaataaaaatatgctatatcgtttaggtgcctttggcttaaatgtaggtagtaaaatcagtattaaacaaaagtgcttgttaaatggaccaagtgttgttgaaattaatggccaatgtgtaagcattcgtcaacgtgatgcacgtttaattatgttagaggagtaagcctatgcacgaaagcttctgtatattaggtaatccaaatgtaggaaagacatcattgtttaatgcactaaccggttcgtatgaatacattggaaactggagtggcgttacagttgaaaagaaagttggacaattaaagaaagatattggcaatttaatcgatttaccgggtatttatgatttatcacctatttctaaagatgaaacagttgtcacagactatctgatgacaaatacatttacaggtatgattaacattattgatgccagtcaattaaagagaaaccttcaactgacaatacaattaatggaattaaatgaacctattatcattggattaaacatggtagatgtggcaacgcaaagaggtattaaaattaaatacgaaggtctaatgagaaaactgaaagtacctgtatttcccattgttgctcgtaaaggaaaaggtacggaggaattgctaaatgaattgtcttttttaaatccaaaagaaagacgtaacttcaaaatcagttatggtaaagaaactgaagatgcgattaagcaaatgacttctatcattcaagcacatacagaatatccttcaaaacgtttacgctttatagcaattcagtatttattagacaatccggaaatcgagcgagaactaccttcagtcatttccgaacaaattgaacctattaaagagaagttaagtcaacacttagatgtatcaatacgacaacatattgaaatcattcgaaatcaatacattgatcgtctattagatggcgtcgttgaatatccgaatgaagaacagcaatttttaactgaaaaactcgataaaataataatgaatagatacttaggtattccaatatttctagtcattatgtggctgatttttcaaacgacatttacttggataggaacaccattatcagatcagctagatgctttctttagcggaccactcacagactggttaaaggcaggcatgcattatatacatgttgcgccatttctacaaaatttgattacagatggtattgtagctggagtaggttcagtcttagtatttgtgccacaaattattgtattattcttctttatttcacttttagaagattcaggatatatggcacgaattgcagttttaatggatagaacaatggaatcaataggattaagtggaaaatcatttattcccatgattattggatttggttgtaatgtacccagtattatggcaacacggagtattgaaaatgaaaaagaaaggttaattactattttaattgcacctttcatgtcatgttcggcgcgattgccagtatatgctatttttgtaggagtattttttgaaaagtatcaatctcttgtagtcctaagtttatatgtattaggaattgtagtggcattaattgtaagtacattacttaacaagtttattcttaaaagtgagaattccgtatttattgtggaactacctacatatagagttccatcaattaaaacgttatggagaagtacttgggaaaaagcaaaaggatttgtaaaaaaagcaggaacatttatttttggtggttctgtagtcatttgggcattgagttacatcggtcctcatggagtgaatgtacagattgatgaaagcttcatgcacagtattggagaattctttggacatctcattgctccattaggatttggtagttggcaagcaggcgctacgttaattccaggattcttagctaaagaagtcattgtaagttctatggctatcttgtattcttctagtgaaggtggtttagtcaatgtcattcaacaacagttcacaccgttatctgcatatgcctttatgatttttatattattatatgtgccatgtatttcaactgttgcaacaattcgtaaagaaacaacatcatggaaatggacacttacagcattaatttatccaatttttacagcgtatatattaacatttgcattttatcaaataacaaaattacttatataaggatgatgacaatgactttattaataaacgtaatcatttttgttgctatttttggttacgctgcgtatacattatataaattctttaatcgctctactcaaggaaaatgtggtagttgcgatacagattgtaattgtgatattaatgcatctagccagttaaatgaattaaaattaaatcatataaaaaacaataattaataataaataacccccgtcgaattaagacgggggttatttattaaaacgatataacgatggtttgatcagtaattaatcgttttaatattaactaatttatgaaaaacgtcatccatttctttaggcgtaagtgttgtctcctcatttttttgccactctaaaaaaccacctataattgaaccaaaaacatagaaaactaagcttttaggaatggtttcttcaagtgctatccgatccatattttcataaacatcatttttgataatatctataagaaactgatttctaactttgttgtattcattatcctcttcttgcatgtgttcgattctagacaatgtttcacgatttaatgaattagacaaaacttgaaacggacgattaatacgttccttaatatcaattgcaaagtaatttttcccaatgacttcaagtaaatagacgagtagttcatatttatcataaaagtgtttataaaatgtagtacgatgaataccaacattttcacaaattttatgaactgtaatagaagagaagggttctatttctagtaaagcatataaactactcgttaacgctttcttagtctttatcactcttaaatctttatcattcatgtctttctcccctaacatgtaaactataaaatatttatatagagatacataatatatgattatagaatagaaatatctataaataaatagagaataactaataaattacaatttaataaaagaaatgattttttatgtttagcgttaaataatttataatatagaaaagttttaactaggatgaatagggtatacaaattttaaagaaattaattagaattataaataaaaattaaaaaattatagaaaaatagtattctttatagaatgattcaatgataattctataaaatataaaaatactctatactggaggatggtaaaatatgaaaggtagtaaaagattaaatcaaattaaagaagataataaaaaacaacttaaaaaattatttaagtatgacaaaaataatgctttatcatttagtaaaccagatcgtgaaaaagttcaagataaatttggtgtatatgttatttttgataaaaaaacaccaatatttgtaggtcaaactggaggatattcaacaggttatcaacctattacgaaagacttatttaacaaaatgggacaatataacttaaaatctggtgtaggcacaacaaaatttaaaaaaggcttagctcaacaaaaaggcttgaacgaagacgatattaaatcaatcactgctgaagattatggattaaaattccaatatgtaaatgttaaagatgagccagcatttatcaatatattagaaattttagcattagaatatgctaaagataaaggctatgaattatataacttcaattaagaactattgtattcttaaaataaacttagtattaaacagttataaatcaatgtgtcagaattgattaatggaagcgagaagaggaattcaaatgaattcagtctcgcttcttattttttattacaatacaatagagtaaggaggaagctattatgttctattcaatgctttatcactctccagtaggtaatttagaaatcgttacagacggagaagtagtgacgcaattagaatatttatatcaatacacgcatttacgttttcctacagatcatgaactatatattttaaaaaaagtaaagcgatggcttgatgactatttcttaggaaataatccagagattgattttcctttacaacctcatggtacatcttttcaacaagaagtatgggcttatcttaatacgatcccatatggagagcttactacttacggaaccattgcaaaacatattggtcaagtattaaacaaaccaaaaatgtctgcacaagctgtaggtggagctgtaggaaaaaatccaatttctatcatcattccttgtcatcgcgttgtaggaaaagatggtagtttaacaggatatggtggaacaattgataataaaattaaattgttagaaattgaaaatgtgaatatgagtcaattatatcgaccattatacacaactaaaccataaataaaaggcgcctaagacataatgagttgtcttaggcgtttataatgttttggggagatgggatgacgaattcattttgagtacatcgtcccaccttttttaatatcggattgatatacattattcaggagaatgataatatctaatatcatcttcaatgttttctaaataaaagatatttttatcgttttctacgttttcaatctcatgattaaaagataaatcatcaaaacgtctgaagaacgattcgtattcttttacagatacttcttgacgctcatttaataaagcttgatgtgcttttttatctaagtgttgttcaaaaccttccactactgtggcgctaaagaattctcccactgacccagaaccataactaaataatccaattgtttgactaggagttaaagttctgttttcaagtaatgaaattaaacttaaataaagtgatccagtatatatattacctacataacgattatagtatacagcatcttcataaccagacgttaatcgagattgagtcgtttcatcagtatcattaatgatagaatctaatgcttttttgcccattttagtaaaaggcacatggaaacataatgattcaaaatcggataatgatttatcttcacgacgtgcatactctttccaactttcttggaatgattcaatatatgcatcttttgataatgcacctgcaacaagtggatatttataaccagtcggtctccagaaatcatacacatctgctgtataagcaacagcatcattgtttaattgtaaaatgcgaggctgatgtgaaattaacattgccactgcaccagcaccttgtgtaggttcaccgcctgactcgataccataacgtgctgtatcacttgcaatgaccaatactttttcgttaggacggtttgcaagataatctttagcaagttgaattgcaggtgtagctgcatagcaagcttctttcatttcaaaacaacgtgcaaaaggttggatatttaataaatggtgaatttgaactgctgcggctttagcgttgtcgatagcagattcagtagcaacgataaccattccaatatgttttttatcatcttctgttataatatctttagcagcattggctcccattgatatgatatcttgagatactggacttactgccatttgtgtttgtccaatcccaattaaaaatttgtttggatcaacttgacgagcctctgcaagcttcgccatgtctacatagtatttagggacataaaaattgattttatcgatacctatattcacaggcatgtcatcctttcgaatagtctaattttaacaatacaatactctgtattttaccaaaataaattactaaaatacaattatatctatattacaggcaaggagataaagaatgaaacaaatcgctattgtaagtgctaaaagaacgccaattggcaaatataaagggaaattgagaaattattcagctgttgaactaggtacaacagctttaaaaggagctattgaatcaattgatatcgatccatctcttattgaacaagttattttcggaaatgtcttacaaagtggtataggacaaaactctgcacgacaaattgctattaaatcaggtgttcctgatacaactccagcgatgacgattaatgaagtatgtggttcaggacttaaagcaattattttagggaagcaacttattcaattaggagaagctaaagtcgttgctgttggtggtgttgaaagtatgactaatgcacctaaacttattttaaaagacggagaagaccctgtagaaagttttatgcatgatggattaacggatgctttccattatgttccgatgggtgtcacagcagaaaatatagctgaaaaatatcatgtaacacgtgacatgcaagacgagtttgctaaccattctcatgctaaagctgcaaaagccgttgaagaaggtaaatttgataacgaaattataaaaatgacagacgctgaaggtaatgagatgacttctgatgaaggtataagatcaaatagtagtgttgaaaaattatctactttgaaaacaatatttaaagagaatggaacagtcactggtggtaatgcttcgagtattaatgatggatcatctgcccttattttaatggaagcaacatttgcaaaagaacatggatttgaaattcttggcatagtaggagattacgctgaagtaggttgcgatccacaatacatgggttatgcacctttttatgcagtagaaaaattattagaaaaaacacatcaacacattaatgatattgatattatagaaatgactgaagcatttgcagctcaaagtatacctgttaaggatcatttaaaaattcctgatagcattttaaatatttatggtggtgccattgcattaggacatcctattggtgcaagtggtgcacgtctcgttacaacacttgtgaatgctttagaacaagaacatcaacatacaggtatcgcaacagcttgcattggtggaggactaggcattgctttaatgattgaaaagggagtacattaatatgaaaagtttagataaaaactttcgtcatttatcaagagaagataaattaaaacaattagtagactacggatggttagataaaacgaattatcaaacattattaagcaatccagttattgatgaggaagtggcaaacagtctcatcgaaaatgtcattggccagggtacgttaccagttggattattacctaaaattatcgtagatgaaaaagaatatgtggtacctatgatggttgaagagccgtcagttgttgctgctgcgagttatggagcgaaacttgttaaccaaactggaggatttaaaacgataaaaagtgaacgattgatgattggacaaatcgtatttgatgatgttaaagatacagaagacttaacacaacgcattcaaaaacaagaaaaccaaattaaacgtattgcagatgaagcctatccttctatcatccgtcgtgggggtggctatcgtggtattgacatagatgcgtttcctaatgaacagttattatctcttaaagtatttgttgatactaaagatgcgatgggcgcaaatatgcttaataccattttagaagcagtgacagcctatctaaaaaatgagttaacagatcaagagatattaatgagtatcttatctaatcatgcaacgtcttctgttgtaagggtagaaggtgagattgatatcaatgatttaaatcgcggcgattattctggtgaagaagtagctaagagaatggagcgtgcgtcagtgcttgcacaagtcgatattcatcgggcagcaacacataacaaaggagtcatgaatggaattcatgccgttgttctagctacaggtaacgatacacgaggtgctgaagcaagtgcgcatacttatgcagcacgtgatggtcagtatagaggcatggccacgtggaaatatgataaagcccgtggacgtattgtgggcacaattgaagtaccgatgactttagccatcgttggcggaggaacgaaagtattaccaatcgcgaaagcttctctagacttactcaacgttgagtctgctagagaattaggacatgtagtggctgcagtaggtttagcacagaacttttcagcttgtagagcccttgtttcagaaggtattcaaaaaggacatatgagtttgcaatataaatcattagcgattgttgtaggcgctaaaggtgaagaaatttcaaaagttgctgagcaacttaaacaagaacctaaagcaaataccgaagcggctaaacgtattttaaaatcaatacgtcaatcttaaaaataagccatgagaatttagaaatggaagagattccatcactaaactttcatggcttattatgttatgtcaattaataaatgtaattgtaattacgcgcagcagatgcactaatataacgcgtactgtaggctagtggacggttataattatattctgaaacaagaatttttccactactgtaaacacgttcaacgatggcaacatgaccgtaatatcctgcagttgattgcataatagcatagcgtttaggcttatgtcctgttctataaccagcacgctgagctctatagtaccaatttttggcattaccccattgatttgaaaccggtttacctaattgaacacgacgttgatatgcccaccaagtacattgatatttattataatagttatagccagctgcttcagaagtatgtgtatgttcaacattttgatatgtataagttccagtaaaaataattgccgtagctaatattaaacgtaaaatgaatgttttaattttcattaagttctcctcaaaaattaaataatttaaagtctaaaataatattattatttaaaaagttgtaatacaatataagaaatgaattatacaaataactgtaatacttctgaaatatatgtaatacattgtaactaaatctttgcataaaaaaagacgccacgagggcgccttagtgagatgatacttccatgtaatgtataactacattttattgaaatcatacatctgtgaattggttaaaaacagctaatgctcttttaacactagtcaccggtatgttttcaagacacggatttgttcgaaaatatagcaatatttcgttttggctcttcacgtctttaggaaaagtgttatcttgattaatccaatttaccaattcacctaatggtgtgtcatcgcctataaaattttgcataaattcgtaaaagctcaattcatcacctcatattcgcttgagccgattttgattataacattttttgtaatttgaaaatatagttttgtttatatgaaaaataatttatttataaatattatttttccataaagtatacatatttgagtcagttctcgaatgaattcaaattgaatgaatttacattttttttacaaaaataatgtataataaaaaaaagaattttttaagaaggtgagcaattggatatcaagcatatgaaatattttatggaagttgtgaatcaaggtggtatgacaaatgcttctaaatctttatatattgctcaaccaactataagtaaagcaataaaagatattgaaaaagaattagacatgcctttattcgatcgacaaaaacgttatttagttcttacagatgcaggaaaagtattttataaaaaatgtgaagaaattttagcattatatgataatattccaaatgaaattaatggcttgcttggtttagaaacaggtcatattaatattgggatgtcagcagtgatggatatgcaacagtttattaatattttggcggagtttcataaattatatccaaacgttacctatagtcttaatgaaagtgggggtaaatcgattgaaaatcgtttgattaacgatcaaatagacattggcattacgaccattcctatagatgagaacacatttgattatgtgtctttatatagtgaagatttaagacttatagtgagtgaagaacatcagttagctaagcgttcatctgtgactatggctgatttgaaaaatgaagattttatattattcaatgaggacttttatcttaatgataaaattatagctgctgcaaaaaatgctggttttatcccaaatacagtgtccaatgtatcacaatggaatttcatcgaatatttagtaatagcacgattaggcgttagtattttaccagaacatattgccaagatgttaaaagatgagattaaaagtataaaaattgaagactcaggtatgagctgggaacttggagcaatttggaaaaaagataaacttttaagttatgcaacttctaaatggataaaatttatgactgagagattggaaaacaagtaaacgattcatttttacaaatagtgaaaaaccttaacgtaggttctctcactatttttttacttttaaaacggttccatagaaaataactataagttatatataaaatcaatatttttataatctatcaatatagattacaattttgaatatagactaaaaaatcgctgtaacaaattcgacaaatttatggaggtcagtcgttttgaaaaaagcattaaatattatagagattattcttcaaatcgtattggtggtagcgattagtattataggttcactgctacaaaaatggctacatataccattagcaggaagtattatcggtatgatattattttatattttattacattttaaaattattcgtgttgaatgggtttctaaaggagccgacttcttattaactacaatggtcttcttctttattccttcagttgtaggaattatggatattgtttctaatatcactacaagttatattattttcttcctcttgattattattggtacaagctgtgtggcacttgtttctggatttattgctgaaacaatgtctaagaaaaaacctcatactaagaaaggaaatcattaaaaatggatatattaaaaggcgttttaatgatattattaactgttgtaatgtataaacttgctcaaatattacaacgtaaatataataacccattattgaatccagcattaatcggttcacttggaataattattgttttacttttaacacgtcaaaactatcacgattacatgattggcggtcaatggattaaccatctattaaatgccactgttgtatgtcttgcttatccactttataaaaataaagataagattgtagaaaatattggggtcattttttcaagcgtcatggctggcgtgatattgaattttgtgttagtgtttagttcgttaaagttattaggttactcagaagaaacaatcgtaactatactacctagatcaatcacagctgctgtaggaattgaagtttctcaagaacttggaggtacagatacgattacagtactgtttatcattactactggattgataggtagtatgatgggttcaatgctacttaaggttggtcaatttaaaacatcaatcgcgagaggtttaacatacggaaatgcatcacatgcttttggaactgcaaaagcgttagaacacgacatcgaatctggcgcatttagctcaattggaatgattttaacagcagttattagttcaattcttattccaattatgattaagttgttttactaaagggaatacagaaataaaatgtatatttaggaaaggggctatttaatcaaatggcgaagattaaagcaaatgaagcattagttaaagcattacaagcttgggatattgatcacttatggggtattccaggtgactcagttgacgcagtagtagataatttaagaacagttagagatactttcaaattttatcatgtacgtcatgaagaagttgcaagcttatcagctgcagcatatacaaagttaacaggtaaaatcggtgtagccttaagtattggtggacctgggattgttcacttattaaatggtatgtatgacgctaaaatggaccgtgtacctcaacttattattacaggtcaaacgaatagtacattattaggtacaaaattcttccaagaaactaacatttctaaaatggttgacgacgtagcagtattccatcaccaagttcaaaaaggtgatgacttatttgaaattacaaatgaagcgattcgtactgcatatgaaaaaaatggtgtagccgttattatttgtccaaatgatctattaactcaaaaaattaaagacactacaaatcgtccagtagatacgtctagaccagtgttaccaacaccatcttatcgtagcattaaaaaagctgctaaattaattaacaaaagtaaaaaaccagttatgcttgttggggtaggtgcaaaaaatgcttcaactgaattacaagacttcattgaagcagctaaaatccctgtaattcatacattaccagctaaaactgttttacctgattcacatccatacagtgtgggtaacttaggtaaaattggtacaaaaacgtcttatcaaactattcaagatgctgatttattaatcatggctggtactaacttcccttatgcaaattacttacctaagaaaaatattaaagcgattcaaatcgacacaaatccaaatgtaattggtgaacgcttcgatattaatgttggtattgttggtgacgttaaattagcattccatcaattaactgaagcaatcaaaccagtacctcatcgttcattcttagacaaaacgttaaaacgtaaagctgtatgggataaatggatggaaaaagacatgaataatacaagtgctccaattcgtccagaacgtttaatgaaaactatcaatgattacagtaaagatgacgctgtatactcaatcgatgttggtacttcaactgtttggggtacacgttacttagacttaaatgttaataataaatttattatctcagcatggttaggtacaatgggttgcggtcttccaggtgcccttgcttctaatattgcttacccaggtcgtcaagcaattgcaattactggtgacggtgcattccaaatggtaatgcaagacttcgcaactgctgttcaatacgatttaccaatgacagtcttcgtattaaataacaaacaattatcattcatcaaatatgaacaacaagctgctggtgaattagaatatgccattgacttctctgatatggatcatgctaaattcgctgaagctgctggtggtaaaggttatgtattaaaagaccctaaccgtattgatgaaattgttgaagcagcattaaatgaaaatgtaccaactgttgttgatgtacatgttgatccaaacgctgcgccattaccaggtcaaatcgttaacgaagaagcatatggttatggtaaatgggcttacagatctatcacagaagataaagaatttgactttgataaagtaccaccaatctctgtagctgctaaacgtttcttataagaaatagattcgacacactgacgaaagtaatgcttttgtcagtgttttttatgaatatttaaattataaaaaatgtaaaatattagtaaaaaagatattgaaaacgctttatattataggtataattaaattgttaaaaaagaactgcgtgttactattcgattaggcatgagcagataagctatcattatttttgtcataaatgatgagcttatttggtcatgcttttttaatgcgtaaaaaagatatattgaaaggattgaatcaaaatgtttaaaaagctatttggacaattgcaacgtattggtaaagcattgatgttacctgtggcaatcttgcctgcagctggattattactagcaattggaacagcttttcaaggtgaagcattacagcaatatcttccatttattaaaaatggagtaattcaaaatattgctaatatgatgacaggtgctggtggtattatttttgataacttacctatcatttttgcactcggtgtagcaataggactagcaggtggagatggtgtagcagccattgcagcttttgtcggatttattattatgaataaaaccatgggagcattcttaaatgttacaccagcacaattggaagacccatctaaaggattcgcaaatgttttaggcatacctacacttcaaactggagtgtttggtgggattattataggtgctttagcagcttggtgttataacaagttttataatatttccttaccatcgtatttagggttctttgcgggtaaacgttttgtgccgattatgatggcaacgacatcgtttattttagctttcccaatggcttggatttggccatccattcaaaatggattaaatgcatttagtacaggtttattagattctaatactggattggcagtattcttatttggatttattaaacgattacttattccatttggtttacatcatattttccatgcgccattctggtttgaatttggttcttggaaaaatgcagctggagaaattattcgaggagatcaacgtatttttattgagcaaatacgtgaaggtgttcatttaacttcaggtaaattcatgcaaggtgaatttcctgttatgatgtttggattaccagcagcagcattagcaatttatcaaacagctaaacctgagaataaaaaggtagttggaggcttgatgttatcagcagctttaacatcattcttaactggtattactgaaccactagaattttcattcttattcgtagcaccattattattctttattcatgcagtacttgatggattatcatttttaacactttatctactacatttacatctaggatatacattctctggaggattcatagattttgttttattaggtattcttccaaataaaacaccatggtggttagtgattccagtaggattagtttacgctgttatttattatgttgtatttagattcttgattgttaaattcaactttaaaacgccaggtcgtgaagataaacaagcctctgtagctaatacatctgcaagtaaattaccttttgatgtgttagatgcaatgggcggtaaagaaaatatcaagcatttagatgcttgtattacgcgtttacgtgttgaagtcaatgataaatctaaagtagacgttgaaggactaaaagcccttggtgcttcaggggtgcttgaagtaggaaataatatgcaagcgatttttggtcctaaatcagatcaaattaaacatgatatggcacgcattatgaatggagatatcacaaaacctagtgaaaccactgtgactgaagatacatcagatgagccagtacagttggaagaggtaaaagaaacggatatctatgcgccaggtacaggtcatataattccattatctgaagtgccagataaagtattctcagaaaaaatgatgggtgacggtattggatttgttcctgaaaaaggcgaaattgtagcaccatttgatggtacagttaaaacgattttcccaacgaaacatgccatcggtttagaatctgatacaggaattgaagtattaattcatattggtatcgatacagtgaaattgaatggtgaaggcttcgaaagtttagtcgatgtcaatgaacctgtcacacaaggtcaaccattaatgaaaattaatttagcatacttaaaagaacatgcgccaagtgtcgttacaccagtgattattacaaatcaaggtgataaaacattaacattcgatgatgttgattcagtagatgctggtaaacgcattatgacaattaagtaataaaacaagcctgggacatcatatgtgtctcaggcgtttttaatgtgttgatagtcgatgactgaattgaaaaggtgtggtctcaagtttttcaattctaatcctctttgccatggcggggcgacgaattcagaaagaattctgtcccccttactttttatttaatatacaacattattcagttatatcattctcaattaataatttgatagctttatgatctgtagcatttctaaataagtcataagcattttcaatgtcacttaatttactataatgtgtcacgagttgttctggttgaatgattttagatttgagagcttccaacaattcttcagtggtattagcagaaactaaacccgttgtaatgttgatatttttaatccataatttttcgatatcaaattgaacgggtaagccgtgaacaccaacattagcaattgttccatcgacgccaatcaacttttgacataaatcaaatgttgctggaataccaactgcttcaatagcaacatcgacgccacgatgattgatatctttgatttgttgaattgcttcattcacatgactagaattaattgtatgagtcgcgccaaattttttggctgtagctaaacgatgatcgtctaaatcaatcataattatttttgaaggtgagtagaattgagcagttaataaagaagctaatccaactggtccagcacctacaatagcaacagtgcttccaggttttacttttccttttaatacgccaatttcataaccagtcggtaaaatatctgaaagcatcacgagtgcttcatcagataaagaagtaggagcatgatataaagaattatctgcaaaaggtactttcacatattctgcttgcgtaccatcaacaagatgtcctaatatccatccaccgccattttcacaatgagcatagataccttttttacagtaataacatttgccacaagatgagatacaagacacaatgactttatcgccgactttgaagttattgacattagaaccaacagattcaacaataccaataccttcgtgacctaatgtggtatattgaggaacttcaggtgtgtcccctttaataatatgtaaatcagtaccacaaattgttgttttgaccattctaataatagcgtcagtactttccgtaacaactggtttttctttatcgacgagcttagctacgccaggtttttcatagatgtaagctttcatgttgattcctccaatataaattgtgaattatttcacaaacattataacattaatttaataagatgtattctattttgaagagaaaatcattgaactcttgttaaacgtatttaacaagaggatttagatgaaaaaataagtgtaacatcgtaaaataaatatgtataagagaactagaccgttaaattaaataagtaggtgaaaatatgactaaaaatattgaaagtatagaacaatttcatcaatttattcaaacgcatcgattagtagtgattcatgttatgcggaatcattgttcagtatgtcatgcggtattgccacaaattgaagatatcgtcaatgattattctaaagtacattttgctgttatcaatcaatctaatgtagaagctattgcgggagaactatctatatttactgttccagtggatttaatatttttggacggaaaagaaatgcatcgacaagcgcgttttatcgatatgcaagattttgagcaccagttaagtttaatgcatgagagtttaaattaagttaagaaagcctaaacacgataaatgaattgttgtgtttaggctttttttactatttatttaagattgattcaatgatagcatcagcacgttgttgatgctctaaaataatatgacttgattgtttgaaacgagtaagttcatcttcttctaatttcagttcaatgacacgatcagcaccattaccgttaatcactgttggcgttccaatataaaggtcatttaatccatattcaccttcaagataacttgacacattcataatcacatttttattaaataaaatagcttctacaatacgtactaaacttaatgatatgccgaagtttgtagtaccttttcgaacgtaaatatcatatcccacttgagtagtttgagaagcgatagattgtttgaacgcggtttggtctactcctttattcaataaatcaagaacaggttcgccggcaatttgagcatgagaccaaacagctacttgagaatcaccatgttcgccaataacaggcgcatagacattttgtggtgccacatcaaacgtgcgacttaagaaaaattcgaagcgggctgtatctaatgaagtgcctgatccaataattttattcttaggaaattgagacacacgttttatgacataactcataatatcgactggattagatggaagtacaaaataaccatcgaaaccatgagcaatgactttttgaatcataggcacaaagatatttacattatcttctaataattttaaacgtgtgtcgcctttatctaattttgcacttgcacaaatgacgacgatatcagcatcactacaatcactatacgaaccaagatgtacatctacaaacttatctccaaaaggtgtagcatggtttaaatcccatacatctgcttttgctttatcttcatcaatatcaataatagctagctcatcgactagtcctttatctacaactgcatgtgcaaacgcagaacctacgaatccactaccaataagcacaattttatttcttttcattcagcataacctactttctaaaataaaataaaaattctgataattgtatttagaatagcacgtatcactatttttttaaatctttaaaagttgaataagcgatttactaaaatataatgactatgaggtatataataatatagagtataggaggttaaaaaatgaaaaaacgattgttaaccgtagcgacatctgcaattcttggaactttagcttacattaaagtaaaagaaaaacgcagttatcaaagctttattactgaaaaatatattcgtatgtctggaatgaaaaaaacatttgaaaatgtgaatgatgctaaaaaagcattagaggaggtcaaactcttaacagctggtaaatatgatgggacagattatgagtttaaacatcgtgcgcatactagaagtattaatggttctgtaacatatattgttaatgataaaagagagcctcatcaagatgttgtgctttacattcatggtggtgcttggttccaagatccattagataatcattttgattttattgatcaacttgcaggagaattggatgcacgagtgattatgcctgtctatcctaaagtacctcatagagactatcgaacaacatttgaattactaaaaaatatttatcaaaaagaaatattagaagttgaaaatccgcaacatatgacgataatgggagattcagcaggcggtcaaatcgctttatcattcgcacaatatcttaaaaaagaaacaccattaccacaaccaggacatattgtgatgctgtctccagttcttgatgcaacatttagcaatcccgaagctaaaaaatatgaaaaaatagatcctatgttaggaattgaaggaagtaaatatttcattcaattatggtctggtgatacgccaatagaagactataaaatatcgccaattaacggagatttagaaggtcttggtcgtatatctatttttataggaacaaaagaaacgctatatccagatgcattaaagctctctaaaatgttaaatgataaagggattgaacatgattttacaccagggtataacttattccatatttatcctattttcccattaccagaacgtcaaaagttctttatacaactgaaaaatataatgggaaaagattaaatactagtttgaacgttagtgttatttttaagagcattaaaataaagaataaaatatctttgatatcacatctgcctaggctgtttttaaaagtaataataaaataatgagtaaaatgagtatcattctaagcatttgaaatacaatgaaaatcgaatgtttaggttgggaaattttatcgaaattcaataaaaaatgtcacttattaatagtctagctctagcagcaagtaacataccaatccgcatgtatatgacgttgattgaatagtaaatcagatactgtaccacttagtcccataataactatggcacctatcatagtaaacagtatttctcttgttcgtttatgagtagtgcccatatgatgtacctctataaacgatattacaatttttatataaatataaaaacagatactaacttgtattattctctagagttagtatctgtttctttatattcagtattaatagtatcgttatgtgaagacaagacatcttcctttttaatttcagtaaagtttgaagtcgagtgtgatgattcgtttttattgattgtctcgtgagaagattgagaacgattgttgatataacgatggtcagtatctaggaccgaatgactcatgtcatttccttgtagactgccaatcaaaataaaaatgagataactagaacaagccaacaaaactaaagcaagataaatgccaactgcaattttaacaggtttagccatagatttatccatttatgtcctcctagagtcatagcaatgtttacttataaactaacatgagagttttaagtaaatgtaaataagaagtaaatatttatcaatttactattaataaatgtaaggcaattaaatttgtcgatattaatttggaataatcaataatttgtctgagaaaatatttatattcttttaatttttttataattttatactatccttaacttaatatttacatttttaaaactgactaaatattaagatgatagcatacccttattaaagtgtttaacgcattcattaagataatattaaatgaaagacaaaatatgtttaaagagagggacttcagtttgattctcattatcatttgtatcgctttgatattatttctaggaattagagagaaaaagcgacatacacaccgtttaaataagattcctctacgaataaatattaatggtattcgtggtaaatcaactattacaagaatgatttatagtattttgcgagaagatcaatatcatgtcattggtaaaacaacaggtactgatgccagaatgttgtattggtttacagagaaagaatatcctgtccttagaaaaccgcaaggcgccaacataggagaacaaagagacattgtgcaaaaagtagttaagcaaaaaggcaatgcgcttgttaatgaatgtatggcagttaatccagattatcaaattgtctttcaagaagatttagtaaaagcgaatattggtgtcattgtcaatgttatggaagaccatatggacgtattagggccgacacttcaagatattgctcaagcatttactgcaacgattccccgaaatggaaaattagtagtcatgaaggatgagtttacagacttttttgctaaagaagctaaaaaacgtaaaactgaacttattgttgtagataaaaatgatatacctgaatcatacttaaggaaatttaattatttagtatttcctgataatgtagccatcgctttaggtgtagctcaagctgtaggagttgaaaaagacgttgcgctgcgcggaatgttaaatgcgcctcccgatcctggagcggttgaaattaaatattttaatgcaaataacacaaaaaatgtatttgttaatgcgtttgctgctaatgagcctcagtctacgaaagcgatattaaataaagtggaatcatacgattatccttatacaaaaaaagtagtgattctgaactgtcgttctgacagggtagatcgaacgcgacagttcgttgaaaattttattgaggacgtcgaattcgataccttaatttgcacaggaaaaagcacgcaaatggttacagatgtaatgcaacgtctacctgaaaagacatacataaatcttgaaaatcatgatttttcagatatagaaaaagcgattcttagtgaatcacagcaggcactcatattttgtgttggaaatattcatggtccaggtggaaaaatagcagaatttatagaagggatagaataaaatgataggttcggagttatacttttccctatttgttggtattgtattaagtttaatttttgcagaaaaatttgggattaatcccgcaggtcttgttgtacctggttatttagcccttatttttgatcaacccattatgttactatctgtgttggtcattagttgtctcacttattttattgttacgtttggtattagtagatgggtcattctttatggtagacgtaaatttgcagcgatgattttaactggtatggttctaaaatttatttttgatttaatttatccactcactccatttgaagttgtagaggtttcaggtatcggagttgttattcctggtattattgccaataccattcaaaaacaaggtgttgtaattacattagctacaacaatgttattaacatgtatgacttatgtcatcttgttcttatatagctttattaattaatcgcgagcgaggagcgcataataatgaaaaaaacaaaacgattatcagcgagcgaatggttacttaagcaatcaaaacgacataaacgaagaaactttttgtatacgtttattgtcttagttatcacagtagtacttctaatttttgctattcgagctgttaaagttgaacctgtagagacgatgccacattcaggtaatagtattagaaatacatatttaggaaatatcactttgaataatgacatcagaaaggtcaatttaaatgatgtttttaaaagtttaagacagccattacaacaaagtgatttttccacagcttctttatatgtgaaccaattttctaaaaatcctaaagaaaatttaaacaaaaacatagaaaacattatgtttttaaaaaaacaaaatattaaaagtatcaatttaattaatagcactatagataatgtacaagcgcaagatttatccaaaaaagttgaagcacaaacagattataattttttaactggaaatggttcgaatccaattaatagtaaaacagtgcaacaaaaagttaaaaataaaaaagtcgctaatgtttcgttcacagatattgaatcgtattatgaagatcctttaaaaaatacgacatctattagcttagatcctaaaatttttgtaccattaattaaaaacttaaaggaaaacaatgatcttgtagttgtgaacgtagattgggggattcctaacgaacgtaatgtaacagatcgccaaaaagcttatgctcatgcattagttgatgcaggtgcagatgtaatcattggccataatacagttatacaaagtattgagaaatataaacatgctagtattttttatagtttaggaaatttaacctctgctgattttctatcaaaaaatcaaaaaagtatagttgttcaacatgattgggatggtcagcatcatcaatttcaaattacacctgttcgctctgcagatggaaaattaacaaaagatcatatgaatagtatggagtcacaacgttattacaataatattaaagataaaacaattcatctgaaagaaaagaatggggggtattcttttgaatattaaacaaaattggttacctattgttacaacactcattattattgctattttattaatggttacatttgctagagcaaatgaaggtctcgataattacgaaaaaaatgaattaaataaagctacggagcaatatttatctaaaggggccaagtagtatgaatatctataataaagtgacactatcagtcattttagtgattacaattttaatctcatttacattttatttttttaataaagaagataaacctgataaagatgatctatatgaaaacaagattgctaaccgtaaatcagcaacctctgatgagcaaaaaacgtatggtgtcgcttcaaacaatgctatcgcaacacgtgtaggtaataaaattattgaagatggtggtaatgcagttgacgcagcggaaggtgtcgcatacgcgcttgcagtaacagaacctcattcatctggattaggtggtggcggcgctacacttacctacgatggtaaaaatggtgaagaacctcgcatgtatgaatataaaacaacatcttcatttaattacaaaaaaggagataaaatagggacacctggttttgtacgcggtttacatgatatgcatgaaaaagaaggtaaaatggatgagaaaaaaatcttaaactatgtcattccattagctgaagatggctttgaagtagattcagagttagaacgtagtttgaaattatttggttctgacattgatcgaaactctcccttctttaaaggcaagcgtacagttcgtgaaggtgcaattgtaaaacaacctgctttagcaaatactttaaagaaaattcgagataaagggccggattatttttataatcatattggaaaaagtttatctaaacaattaaaaaatcaactcactgaagaggattttaaacaagtaaaaacagaagaaaagaaacctattagtacaaaatatttaaacaatactgtttatgctgcatctaacccattaggtgggatcttaatggaacaaggtttgaagattgatgaaagcgtaaattctgcaaatgatcgtacagattatattacagggattgtcaaatctcgtgatattatgtatcgaaatagagatattgttaatggcaaagaatctagtagcaatacctacttgtctcaagattatttattagataagattaacggtatcaattttgacgaacaaggtagtgacttcaatacacaacgtattgataacacaagtacaacgcactttgtagtgattgataagaacggtaagttagcaagtactacaaatacattatcaagcttctttggaacaggtaaatatgttaaagaaggtttttacatgaacaactcactaacaaacttttcaacagatccaaacagtccaaactatggtgagaaacataaagcaccacgttcttatacgtcacctactattattgttggacccgacttctatatgggcattggtacgccaggaggaaataaaattccaacgattcttaatgaagtcattgtagactatttaagaggaaatggtacgttgcaagaatctattaataagccacgtttttataatgatggtggaacaatcttctatgaaaatgctatggatgataacgatgtcaatattttcaaaagtctaggttttggtgtagaagaaaaacgtaacgaccctaactttggtagtgtgcaaggtgccgtttataataagaatgatagaacagtggaaattgggcatgatgtagggaatagataataaaaaaggacaaaaatcaatcggtttttgtccttttttatttactcaaaataagtattgaaataattatttaaaacgctatcataaatacatagatagctaaatttaatttatttacaatagaaaatataaaaataataaattgtcattaatataatgatatgaatagtgatataaagggtgagtcgtatgaaagaagcagtattaggtattgatcttggaacgagcgcagttaaaattattgcggtaaatcaaacaggccatgtgattacttcaacaagtgtgcctttaaatttaatacaatcccaacctggatatagcgaacaagatccagaggaatggtttaatgcagttaaaacaggcatatatcggttaaatcattctgatgaaatgaaatcgtataaagtgaagggcatctcattctcaggtcaaatgcatggactagtagccttagataaagaaggtcaccctgtacgacatgctatcctttggaatgatacacgtaattcagaacaatgtaagcaaattcgatcggtttatggagagcgattaaatggaaatccgattcttgagggttttacacttcctaagatgatgtgggtaagtacacatgagcctgaactatggaagaaagtagatgtgttcgttcttcctaaagattatgtacgttattgtttaacgggtaagattcacatggaatattctgacgctgcaagtacgctccttcttagtccagaaacgcatgattggtcaaaagaagttggagatacatttgatataggagatgtttatccatcacttgtgaaatccacagacgaagttggaatgattcaagaccccttagcgagtgaacttggttttacatctccagtaaaagtatttgctgggggtggagacaatgcctgtggtgctattggtgcaggtataatcaatgataatgatacattatgtagtattggtacttctggtgtaatcgtaaacgtagaaaaaagtaatcaaacgcactataaaaataatatacatttttttgatcatagtgttccaaatacatattatgcaatgggagtaacgttggctgcaggatatagtcttaattggttaaagagaacattttttgataacgatacgtttgatgaaattgttaaacaagcgagtacctcgtcaataggtgcaaatcgtttattatttgcgccttacctagctggtgagcgtacaccacatggcgatgcatttattcgagggagtttcattggtattagcggtaaccattctaaatcagactttgcacgggcggtactagaaggtattaccttttctttatatgattcaattcaattgatgcgagaagcgggaaaagaaattacacatattacttcaattggtggaggggcaaaaagtgaattttggcttcaaatgcaagctgatatttttaatgcatctatacgtaaattgaagcatgaagaaggaccaagtatgggggcagcaatgattgcggcgtacggattacaatggtttgattcttttgatgactgtgtagcacaatttatagacgttgaacatatatatgaaccaaatttgcaacgacaccaacaatatgaatcttattacaatatttataaacaaatctatcaacatacacatcaacttacagaagcattattaaagatttaaagcgtttagcccatgattatttagaaagaaactcgaagaatcagatgacaaagtagggacagacatcgtttttatgtccctacttttttaatagtaaattccgattaacattcctttttataattaaaatattatatttataaaaaatatattgacaaaaatctaatatagatattaaataatatatataaattcctcattccaaataacactatctgttaagtatggaaaggagtgatagttatgaacgatacccatttcattgatcaactatcacacgtaaatatgattgagacgctttatttaaattccaatgatttaaaaccctctatgaatcttttcctaaatttattatttaaacgattattactagaatattatgtatacattcgtacaatttacaataagtatgcatgtttagaaatgccatttctatcctttcaactttttttcaatcattttcatgatttattttatatcatgtatacactcatcgatacgcaaaatataacaacttattctaacgttttagaatagtaaaacgatatagttaagtatgtttgtgtgtataagagatccaccccgttaagaaatagagtgagtaagaaaacaataaataattgataaaattcaatcaagtggtgaacattcatattactaaaagatgaattataactgagtgtatttataaacatctttttcagtagaagtgagtatatttctcatttctactgtttttttatgaataaaattaatattttgcgtctaatttttttacaagaaaattaaattcgttaaaatacttaaaatgtgaattatttcacaaataaattttggatttactatattaggtgttgaaaacgttttctgccaggtgtactatgacattggctaggaaattagagagaaagaggttattgggaaatgaatattattttaggcgttggcactcttgtattagtattaattgtaatgacacttttcttaaactttgcaccatatgggaaacaaggattacaagcactgtcgggagcagcctgtgcgactttcttaccacaagcattcttaagttatgcgataggtgacgttttccatattcacttcttccaagtgattggagatttagcaggaagtttagctggcgttgcagtagggattttgacatgtgttaatttaggtatttccccagtatttgcagttatcgttggtttagtattacatgattttaaattactaccagcatttattgcagcgtatgttatttcatttggtattaaatttattgagaagaaagtaccagaagggttagacttaattacagttattttaattgctccagctgttgcatttggcttagcaacggtaattagcccaggcgtaatggctgtattgcaacaaattggtggcgcaattactgctgtaggagatagtaatccatacgctttagcagtgatacttggattagtaattccagttacaggtatgacaccattaagttcaatggtactgacaagcttattaggtttaacaggtgtaccaatggcaatcggtgcattaacttgtacaggcgcttcatttgttaactacgtgatgtttagtagattaaacattggtggtccatctaaagcatttgcagtttttgttgaaccgctcactcaaattgatttaattgctaaatatccattacaattatatggaacaaatgccttgattggtgtagtaaatgcatgtattgtaacatttagtggactagtaataaatgtaaaaggtatggctacaccaattgctggtgcaattgtattgtttggctttaatacaccaatgaaagcagtaattacaatcattgctgtagcaatttcaagtatcattttggcgttcgttatcagtacattgattaaaaaattcaatcttatggatttatctattaaattaccatctaaacaaaaacaacctaaggagagtgtttaagaatggctactaaaaaaagttatgactatcaaagtgcgtttgatattattgggccagtcatgatgggaccttcaagttctcatacagctggagcagtaaaaatagggaatgctacttttaatgtactaggaggcattaaaccagaaacattagcaattcattattatgaatcattcgcaaaaacacaccaagggcatggtacagatttagcaattgtaggtggtgcaatgggttatagtacgttcgatagtcgaattaaagattcattaactattgctaacgatttaggtattcatgttgatattattgaagaagatggagaaagtattggagaacatccaaactgtgcttatttaattgctgaagcgaatggacgtcatattgaagtaattggtaattctataggtggcggtaccattaaattgagaagaattagtgttgaaggtatagatgttaactttaatcatggcttacctattttagtcatggatggatctaaaaataagtcggaagtgaatcatttcttaaatgatgtaaacgaacttggcgtaagtatagatgaagaattggttgatacagatgatgataatagtttagttgttttaccgttaacaaaagcaatcaaagaatcaacattaaatcaaattaaagaaaaatataatcacttaaacatatcctatataaaataaaggaggattaaaaatgttcgattcaattagagaaactatagattatgctgttgaaaacaatatgtcattcgcggatattatgattcaagaagaaatggaattatcaggtcaatcacgtgatgaagttagagatttaatgaaagaaaatttacaagtcatgcgtgatgctgtagttaaagggaccacaggagatggggtagaaagtgtcacaggttatacgggacatgatgcagctaaaatccgtgattacaacgaaaatcatcatgctttatcaggccatgaaatgatggaagcagtcaaaggcgctgtagcaacaaatgaagtgaatgcggcaatgggtattatttgcgcgacaccgacagctgggtcctccggtacgattccgggcgtattatttaaattagaaaaaacacatggtttaacagaagatcaaatggttgatttcctatttgttgcatcattatttggacgtgtagttgcaaataatgcgagtgttgctggagcaacgggaggttgtcaagcagaagtaggttcagcttcagctatggcagcagcagctgcagtatcggtctttggtggtgaaccagaagcttcgggtcatgcgatggcattagctattagtaacttattaggccttgtgtgtgacccagtggctggacttgttgaaattccatgcgtcatgcgtaatgccattggttcaggaaatgcattgatttcagcagacttagcattagctggtgtgaaaagtagaattccagtcgatgaagtcatcgaagcgatggacaaagtagggcgaaacttaccagcacaacttagagaaactggactaggtggtttagcaggtacaccaacaggagaagccattaaacaaaaaatctttggtaatgcagaagatccagtcaatagtttttcataatatttaaaatcctaaaccattcttgaatgatagcatattcaagaatggttttttatgcctttaattatcagaaaatttcaaaaaataattgcaatatttcacttttaaatatagaataacttaaaaggggatgatgatatgcttagattatatattttatttttaaccttcatcattaatacaacgttaacacgtgtatggacgatcgaaggaacttgggagcatcttttacttcaatcaatgtctatgagtataatgtttgtatttcttttttactatgtgtgttttatgcttgaaaatagaaaacataacaaaatagataaacttagagatgaaaaataaacaaaaaagtcgagacagttatttgaataacagggtctcgatttttttatgaattatgtatccgcttttaaatcgtattgatagaaagctaaatcaagccaacgttcaaatttatagcctacgttttcaatcgtaccagcatgtttaaaattgaatgtttcatgaagtttaatacttgcttcatttaatgtatctatacctgcaactatagtacgatactggcggtgtttagcatcatcaattaaatgttcgagtaaatgtgatgccacgcctcttctacgatagtctttatttacatatatagaatgctcaatagaatataaataggctggccaatgtctaaattgaccatacgtggcaaacccagctactttatgatctatttcaaatacaaatataggttcgtttgcaagcacttttgtttcgaaccatacttctcgttcattaagactttgtggatgataagtatatacagccgttgtattcaatatagcatcattataaatatttaatatatcaggtaaatctttacgttctgcttctctaattatgataagcacctacttatagtatttattattaatttaagcacttgcatgaaattaaatcaaatatatatcatataatctaacattttatttagaaaaataaatggtatactatgaattaagaattttaaaattaaaggagtactacttagtgaagaattggacaaatcgactcatgaccatgattggcgtgattttgatattagtagcagtatatttatttgcgaaaccatatattgataattacttacatcaaaaagataataacgataaagtagaacaatacgataaaaatgataaaagcaatacatcaaaagaaagacctacgattccaaaagataaatcgaaaatggcagggtatatcagtgtacccgatgcggaaatcaaagaacctgtttacccaggtcctgcgacacttgaacaacttaatagaggtgtaagttttgcagaaggtgatgaatcacttgatgatcaaaatatttctattgcaggacatacgtttactgatcgtccacattaccaatttacaaatttaaaagcagcaaaaaaaggcagcaaagtttattttaaagttggagatgaaacacgagaatataaaatgacaagcatccgagatgtaaaccctgaagatgttcaagtattagatgaacatgaaggggaaaccaatcaactgacattaatcacgtgtgataattataatcaacaaacaggcgtttgggaaaaaagaaaaattttcgtagctaaacaaattaaataaatactttagttgaccgttcatcttctcattgatgagcggtttttatgcataaaattttattctttgtatgtaatttctaaatgtgaatatagtttcactcttcaagtactgacttcaatcccaatcataaggtggatataatggacgatgaaaagtattgtaagggggaaaccactcatgattagagccattgcagtagatatggatgggacatttttagatacaaataaagaatatgacaaagtgcgatttgagacaatttatcaagaattaaaacgaaaccatattgaatttattgcagccagtggtaatcaatatgcaaagttaaagtctatttttggagagcgagacatgtatttcatttctgagaatggtgcagtgatttatcatggcaatcaattgtataattactgtagttttgatcaaactatatatgacaaagtagtgaattatattcatcttgatcaacacatcgacgaattcattgtatgtggacttaaaagtgcatatattttaaaagatacgtcagaagcctttaaaaaggatgctcatttttattatcgtcaattagaagaaatagatacatttcaacctttacctaatgatgaatatgtgaagattgcattaaatattaatcgtgagacacatcccaatttggacacagatttagaaacaaagtttaaagaagaaattaaactggtttcaagtggccatgatagtatcgatattattatgcctaatatgacaaaaggccaagcgttaaaacgtttgttaaaaaaatgggacatgtcaccatcagaattaatggcattcggtgatgctaacaatgataaagatatgctagaatttgcagagcatagttatgttatggcaaatagccatgatcaatcattatttgatatcgcaaaatttgtagcgccaagtaacgatgaacaaggggtacttcaaatgatagaagaaaaagtattaaaaagtgagacagaataattcgtcgactcactcagtggtcgactgccaacacataaaaatgcctgggacatcataagttgtcccaggcatttttatatatcaaatcttagtttaattgagtgtcacatttacctgtgttaatgacagataatgcagcatttaatccaccttcaactaagtttctaactgcttcatctgagaagaaagcaatatgaggtgtcactaagatgttttcattttcaattaattcaagtaaagttttatcttcaatttctttacctgtccagtcatatgtgaagtaatcagcttcattttcatatgtgtcaatggcagcaccatataaagtaccatcatttacagcatcaattaaagctggtgtatcaataacagcaccacgagcagcgttgactaatacagcgccttttttcactttgctaaacatgtcagcatcgaataagtggaagctttctttgttagcaggtacatgtaaagaaatgatatcagcatcggcaattgcttcttcaactgaatctttatattctaagaaatctaatgagttgtttggatatgcatcatagcctactacttttgcaccaaaaccagcataaattttaccagttgcagcaccaatacggcctgtaccgataattgcaacagtcatgtttttaacaggtgtagacatgataggtgcagcccatttgaaattatgttcttgaacgcgtttttcaattgcagggaatttacgtactaattgtaaagcgattgatactgagtattcagcaattgtttcaggtgaataacttggtacgttagaaattacaatattgtgtttttttgcaagatctaaatcatacatatcaaaaccagcagtacgttgagcgatttgtttaataccgtatttttcaagtttaggataaacagaatctgctaatttaccgaattgcattgtagttacgccatcgaaaccttctaattgatctactgtgtcttcgcttaaaatatcttcagaagtaacaacttctacattgtgttctttaccccaatttaaagcgtcttttttttcgtaatcacgagttccgaaaaacataatttttgtcattaaaataaccccatttcattttgtataaataagttaaaatttaataaatacgtaagactaaagttgaagtaagagattgggtacaacatcattgaatgttatctctaacacaacttacaaccctattatattgtgaattagttcacaaatcaattaaaaaagggacttttattttgtataatatgaaattatatacataaaatatcatttaaaatgaaatattacaacttgggaataggtgaatccttttgagctaattattttggctaaaataatttgtattttataatttgagtaagtttttaaatagaggagtggatgactatcaatcagattcaaaataccattatagatgcgtttaaatttagatttgctactaaggaattcgatacaacaaaaaagataagtgattctgaattcaataccattcttgaagcaggacgattatctcctagttcgttaggtcttgagccttggagatttcttgtgattcaaaacgaaacgctacgtgagaaattaataccttatagttctggtgcacaaaagcaacttaattctgccagtcattttgtactaattttagcccgtaagaatgtaacaccgacgtctgattatgtacagtcatttattagagggattaagcagtatgaagagagcaccattccaatgtttgaagataaagtacagggattccaaacacgtttccatattaatgataatgctagaaccattttggattgggcgtctaaacaaacctacattgcattaggtaatatgatgacagcagctgcattaatgaatattgattcctgtccaatggaaggtttcgatttagatggcgtaactgagttattagaacatgaagggatcattgatagtaatcagtttgcaccttcagttatggtagcttttggttatagaaaagagaatcctacaaaacctaaaacacgtcaaccacaagaagatgtaattaaatggataaattaagcatagttttgtaaaaaaagggtaaataataagtatacaaaacgtatcaatgaatgaagtaaatttaacattactttatatagagttacgttatgatttataaacaaagaaagagggatgaaaacggatggcaaaagtaaatgttagagattttttagatgaacaatatgatttatttataaatggtgaattccaaccaagtgaaagtggagaaacacttacggtaactaacccagcaaatggtgaagagttagccaaagttgctaaagcaaatgaaaaagatgttgataaagcagtgcaatcagcacatgaggcatttgatagttggagtaaaatttctaaagcagaacgtgcagattatttattagaaattagtcgtcgtattgaagaaaataaggaacatttagcaacagttgaatcacttcaaaatggtaaaccttaccgtgaaacatcaacaattgatgttcctcaagtagctgaacaatttaaatattttgcaggagtattaacgactgatgaaggttcggttaaccaaatagatcataacacgatgagtttagttgtaaatgaacctgtgggagtagtaggtgcagtagtagcatggaacttcccaatcttacttgcatcttggaaattaggtccagcattagcagcgggtaatacagtggtaattcaaccttcttcttctacaccattaagcttaattgaattagctaaaattcttcaagatgtgttacctaaaggtgtagtcaacgtcattactggtaaaggttcagaatcaggtgatgcgattttcaaacatgaaggtgtaaataaattatcattcactggttcaacaagtgtaggttatggtgttgctaaagcaggcgctgaacgtattgtgccaactacgttagaacttggcggtaaaagtgctaatattatctttgatgatgcaaatttagatcaagtcattgaaggcgttcaattaggtattctattcaaccaaggtgaagtatgtagtgccggttcacgtttattagtacaatcatctttatatgataaattattaccaaaattaaaagaagcgttcgaaaatattaaagtgggtgacccattcgctgaagatacaaaaatgggtgcacaaactggcccagaacaaattgaaaaaattgaaagttatattaaattagcagaagaagatgacaaagcaaatattttaacgggtggacatcgtattactgataatggtttagataaaggctacttcttcgaaccaacaatcattgaactttcagataatagtcataaattagctcaagaagagatttttggacctgttattgttgttgaaaaattcgaagatgaagaagaagcaattaacattgctaatgattcagaatatggtttagctggtggtgtcttcactacaaacttacttcgtgcattaaatgttgcaaaagcaattcgtactggacgtatttgggttaatacgtataatcaaatcccagctggtgcaccatttggtggttataaaaaatctggtatcggccgtgaagtttataaagatgcaattaaaaactatcaacaagttaaaaacatctttattgatacaagtaatgaaacaaaaggcttatactaattaaaatatgattaaatagtttaatacatgttttaaaatgtcgacaaaggtatatactttgtcggcatttttttatgaagtatgattaaaaattagaaaagtatgacagatttcattttgaagttgtataagtctctcggtaatcccaatttaacgtatatgcagacgttttgatgaaaatctaaatagtaagatcttcgaactgaaatcaaaatttaatataaattgtattttcaatttaaaaattgatggttaatataatataaatacgtctttatattttaagtttgatgaaatttaaatacattatatattttgaaaagagaaaatgatgaaacgtttaaaatttttagttatttatttagttattacaattatagtaagcggttgttcaaacattgataatgtaaagcatcctaaagaagcctatacacctaaatcattaactgttgagtttgttccatctcaaaatgctcaaatccttaatgctaaagtaaaacctttgcaacaattattatctgatgagctggaagttcctgtaaaagtacatatagcaacaaattataatacaatgatagaagggttgaaatcgaaaaaaatcgatattgcatttatttctcctgtttcttacacattagctcatgatgctcatgcagcagatgtattgttaaagtcaaaaggttacttagtagataataaaggaaatcaaacacatcaccttgtagattactatcgatctcaaattgtggttcgtaaagatagtaatattaatcatttaaaagatttgaaagataagagggtagcgttacaagatgtggaatcaacgtcaggatatatttatcctttagcatcgttaatggaaaaaggaataaaaaagtctgatattcaaattcaacaagtgaaaggtcatgatcaggggttaattgcattattaaatcatgatgtagaagctgttgctacatatcaagatgctcgggcagatttaaaaaaagagtatcccaatatttatcaagaaactaaagtgatttatcgcacaaagaaaattccgaatgataccatttcagtacgtaatgacatgagtagcaaatggaaaaagaaaattagtaaagcatttattgatatcagtcatacaaaaaaaggtaaacatgttattagtgatatttatggtcatcaaggttatgaaaaagcaaaagatagtgactttgatactgtaagaaaatatcgagatattgtagattaaaaaaagattggatgattgtcatccaaccttttttttaatcaggaactacacttacatctccatgaacagtcacactaaacccttcaggtgatgttaaattcgtttctttagcgtgaggttgatagatatcaatatgtgttaatccataagtgttcttattgtctggattcacttgattagattgccatgtattcacagcaatgtgatgatgatagtgttgtgtagaaataaataaactttgagggaggtttgaaatatgttcaaaaccaagtttatcaatatagaattgacgagcctccatcaaattatgtgtttttaaatggagatgtcctagttttccatctgatggaaaaccttgccaacccttttcagtacgatgtgaaattaaatcttgtgcatcaacttcaagggtatccattttaataaagccattctcccattcccaaccactagaagggcgatcttgatagacttcaataccattaccttctggatcattgaaatatagcgcttcacttactaaatggtcaccgccaccaacaggctgatttaaacgactcatatgatataggaagttagctaagtcttgtcgtgaaggtaataaataagcgatatgaaaaaggccagcttctctaaattcaggatgacgtccatgatttaaaagatgaagcgttaacgtgtgaccatgttctccaacattaaaaatggtttgtgtgtcagttttctttttaatagaaaagccgagtacttcagaataaaagtgattcattttgtttaaatctttaacatttaaagtgacgttcgtcacttgcattgcttcttttgaatgaaatgtagtcatgtatcattgcctctcttttttatactaagtatattaaatatactagaatgattaataggaaacaagataaataacttaattaaaaaaatcctctagagaatgattctctagaggattttattttactcttatcctaaataaacatcttggtaactatcatttttttctaatacatcttttgcaaatggacaagaagcgataatttttaagttattttgacgagcatgttctacaactgcatcaactaatttagttcctaaaccttgaccacctaattcatcagatacaccagtgtgatcgatttcaatttcattgttatctacttgtttgtaagtgatttctgctttaggattattttcgtcttcacctacataaaatttattgttaccttgtttaatttcttcagccatattacttcactccttatataatgtcttagtattatttatcacatttccactaaattaaaacattacataaataaaatttagaatataaaaattataaaaaatttaaatacaaagttattgcttttttataaaagaacagatatagttgagaacgaaattattacgttttggaggggtttgtgtgaagaagatgatcgcaattatcggtttgatgtgtttgtgtctcatattatctgcttgtagtacaaaccgcgatatcactcacaaacagaaaaaagtaacaactgagaataaattaaaaatttataccacggtttttgcgtttgaaagctttacaaaacaaattggtggtaaatatgtggatgtagatacgatttatccaccgggtgctgatatgcatacatatgaacctagtcaacgcgatatgattaatattgcaaaaagtgatttatttgtttattcaagtgatcatcttgatccagtagcagctaaaattacaaaatcaatgaataataatgatatgaaattagcggttgcaaatagtttaaataaacaaatccttgtgaatgaagatgatgatcacgatgaacatggacatcatcatgaagcaacatcatatgatcctcatgtttggcttgatccaatactagaccaacaattcgcaaagaaaattaaagatgatttagttcataaagatcctgcgcatcgtagatattatgagcataactataaacaattagttgaagatttaaaacaaattgaccatacattatctaacataacgacgcgtcctaaacgagataaagtaattatttctcatgattcattaggatatttagcgcgacgttaccacttcgaacaagaaggggttagtggtatgaataataaagagccaagtcagaaagacatcttagcgctcattaatcaaataaaagacacacatgaaccgtatattttatatgaacaaaatatttcttcaaaaataaccgatgtgattcgtaaagagacccaaactcaacctgtaaattttaataatttagcagtattgtctcaatcccaatcagaagatcaaacactcacttttcaatccattatgaaaaaaaatattcaagccctcgataaagcattaaacaaataaaaaggagagcaagaaagaatggcgttacatctttcttgctctctttttttatttttaatttaccatctaatataacttacagttgtattgtaatattcttcaaaaccatgaataccatctgcaccaccaaggccagattctctccaacctgcgtgataaccattgactgcttcttctgcctcacagttcgcatacacttctccaaattttaaacgttcagtagctgtcataatttcttttaagttttcagagaaaatataagatgatagacctgcattcgtatcatttgccatatcaataacgtcatcaaagtttgtatacgtagttatagcaagaacaggaccgaaaatttcttctttaaaagcactatcagtcgtttttacatgatctaaaattgtaggagcgtagaagaatccttcacgatctaatttatagccacctaatactaaatctgcgccatgttttactgcttcttgaactttatcatcaatactatctaattgtttttgattaatgattgcaccatagtcagtgttttcatcgtatggatctccaacttgaagcgcattcattttatctttcactttattaataaagtcatcatgtacatcttcatgaacaaagatacgttctggacatgtacatacttggcctgcgttattaatacgtgcagtaacaatataatcaacagctttatctaagtcagcgtgttgtgtgacaagaacaggagcatttccacctagttctaagttgagttttttaatgctgtcagccgcatttttaaatacagctttacctgcgcccatactacccgttaatgaaacaagctgaatatctttatgagttgccaattgtgttccaactgtttcaccagtacctggaacgatttgaataagaccagctggaatagttgaatcacggaaaagttcagcaatttttaatgttaataatgttgtttcttcacttggtttgataacgacagaacaacccgttacaatagctggaatcactttacgcataagcactaaaattggagcattccaaggcacaataccagccgtcacaccgataggtttttttgtcagttgaatggtttcgtttactatactattttgtaatacttcacctttgttactcatacttaaacttgccatataatcaatgaattctattgatttatcaatttcacctttagcttgtactattgttttaccttgttctttaacgtataaatgagcaatgtcatctttatgttgttcaagtaaaggaattaataattttacatgctcagcacgtgtaggagctggtactttttcccattcaagttgagcgtgtttagatttttcaattgcgtcgtttacctcttcttcagtagcgaatgtaatcgtatcgattgtttctcccgtagcaggattaatcacgtccattgtttcgtttgacttactttctacaaattcattattaataaatagttgattcgtcattaacgacacctccatacctattattcccgtaaagtattaaatttaatctataaaaaaagaagattcaaaagaagattaatgttctccctttgaaccttctttttttgaatatttaaaatgtctaacccctttatataaaataggaatgagtagaataaagccaaataaccccataattggaaatactttgccaatgagtgaaataaagccgataaatgtacaaatgaacgtcacgattgtcatgacgataataagtacaaaatattgttttgaaaacggtgttgtgaaacgagaggcgaatgcgtacattaagcctacaatagtattatagataactagaatcataataatagacatgatagttcccaaaataggtgagatatgtcgtgccaataataaggttggaagcgctacggatttaatatcattaaattttgtcattaagcctaaattaatcattaaaagtaaaaatgtaataatgacgccaccgattaatccgccccaaatagaagcacgttggtcatgtaaacgcccccccatgacacttagaaaactgaaggcagcagcaatttgtaaactggcataattaataccatcaaaccaccatccaagtgaaatagatgatttatgctgtgcatattgatttgcactttcaaagtcaagatggccagttgcaagataataaatcgcaataattgtgacgacgataactaagaaaggtgtaacgatacctaatactgcaattaaacgatcaaattttaaaaataatgtaaccaaaattagaccgacgagaataagtgaactaagccaataaggtaaatgaaaactttcttgaattgtagatgccccgcccgcgctcataataatagcgagtgaaaacaaaaataatgttaggacaatatcaaatactcgagcaatcatagggtgcaaataataatgaatggattctgaatgattatgtgattttatgttgtaaccagtatttaagacaaacataccgcctagtgtgatgattaatcctgtaatcataatccctaagacactgaattgaccgttacttgtgaaaaattggaatatttcttgacctgtagcaaaaccagcaccaacgacaacacctacaaaggcaaatgctacgatcatcgactcttttaaaactttcatttttaaaaatcctttctaaatcaaacacatgagaatatattaatctattttaaaggacattttgttaaaaataaatattaaagtttacttgtaatgaacattgtatttctcaaaaatacattagaaagaatttgtataaattttaagttatatggggtatataatagtttatagttcttatataaatgttgtttaaaaaatgtaattaatatactatacattattcagtaaagtttgataggatattgcaatatattcaatttaaataaggaaggtgtagatatgttatttgatttacctgtaatgctagttattgtgttatttcttgcattaggtatcttcagtcaatggttagcaaatcgaattaaatggccttcaattgtagtcatgtcgattgttggtttattagtgggacctatattaggactagcaaatcctgagcaaacactaggttcagagatatttagtccaattgtatctcttgcggtagcaatcatattatttgaagggagtagtaatttagattttagagaattaaaaggtatttctaaggcggttatacgtattattacgataggagccacaattgcatgggcgcttggagctattgctttacataaaattttaggttttcctatttctatcgccattgttatgggaggattacttcttattactggaccaacagtgattcagccactgttaaaacaagcaaaagttagaaacagtgtagataccgtcttacgttgggaaagtattatacttgatccacttggtccaatactagcattagctgcattttatgtgtatcaaatcattggacaaggttttggtttccaattactctttatatttatttttaaaatgttgattgtagcattcattggctttggtgcttcattcttcttcaattggctcatccaacgcgatgtcataccacaaaatttaatgccttccattcagttggtgtttatattgcttgtgtttagcatctgtgaccaaattctcgatgaatctggtttactggcagtaaccatttttggattaatgatggcacgttataaacgacatgatttaatttataaagagtcagatcattttattgaaaatatgtcttccattttagtttcaacggtgtttattttaataacatcatcattaacaccgtctgtattgatggatgtattatcatggaaacttgtgattttctcacttgttatgattgtgttagtacgtcccattgctgttttattatctaccattggtactgaaatcactaaaaaagagcgtgcgcttgtagccatgatggcaccaagagggattgttgtattaactgtagcacaatttttcggtggattatttttaaatgataatataaaaatggcatcttatattacaccggtaacatttggtttagtatttattactgtagtaatatatggttttagctttacaccaataagtaaaatgcttggtttagcaagcactgaacctccaggtgtcattttagtaggtgagagcgaattttcttatcacttaggtagacagttacaatcgcatggtattccagtgatggtgtttaacttgtttagtaacacttctgataaagctgaagaactcggttttgaaatttttaaaggaaatttattatcaagtagtgatcgtatgtatgcagacttaattcgctataacaaatgcttattaatgaccaaatcatttatttttaatagtcttgcatttaatgagttagttccagaatttggattaaataatgtaaatatgatgccagtatcctttacagatgatcaagcacgtaataatttaaatggaccgcttcgtaatcatattttattcgatgaagagcatagtccaagatggtttgacaatgtgattacgaatcaaaatattatcgaagttccagcctcttcatatcatgatattacagataaagatatgattatttatcacattagtgacgataaagaagcgacattccataggagtacaaaatcaatggatgaatatgacaatggaacatatggtattttaagaaacgtatataaataataaaaacgcccggcgacagttcatttgaagtgtcgccgggcattattataggtttattttaaatatctgtcgtgcattaataattttaacatgcgaatttgttccataatgtctttaccgacatttgtatctctaatttttttacgttgtaattcttcatcaacgacacgtcgtactgatagttcatcagcaccatcagataagacattctctttagaatcaaagaattggtgtgctacaagctgcataccaaatgaattgtaaagtaacgtgtaacctgcgatacctgtcgtagattgataagcttttgagaatccaccatcaatgactaacatcttcccattagctttaataggatcctcgccatcgatttcttttactggtgtatgtccattgataatacgaccttcatcaggattaagtccgaaatcttttagcattttgcgaatcatatcaacatcttcacgtaagtaataataagggtttttcggttctttatgagacgctttatcttcaatgaagtagcgctcaaatgtagtcatggcacgtttaccaaataaagaactgtattttcctgtccataaataccatacaagatccgtagataaatcatctgttttctctttgtcgctaaacgctaagcgcacgtgacgttcaaagacatctaataaatcacggcctttatgttttacaccttcaatttcaaaagattccatttcgccattatcatctacaggaatgcaaccatgaataagaagatttccattataagggagatataatttacctttttgcattagaaaggccatatgacgttttaatttttcagattgttggaaagacagtaataatttattaacaacatcttcttcttctggtaataattttgcaggatctttagggtccaccgtactaaagcaagtatcttttaaaggatacgttttaccataaattgtaatttcgtttgtatcataatttattttttctaaaactaaacggtcttccatttcaaaacttgggcgacgtttaataattggcatttcaagcttaaattgaatcattgcaatggcttggtgaatcttagtaatttgtgcttcttcgtgtttagataagcccacttttttatccggacgttttttcggtttgaacgctgggttatcgccatcgtaatgtttttcagctaaagtgaggagtggtcttaaattaataccatatgcatcttcaataatatctaagttatcgtagcgtgcacatatacgtagtaaattggctaaacacactttagaacctgcataagctccaatccaaagtacatcatgattaccccattgaatatcaacagaatggtagtcaattaatgtatccataattttgtcaggttctggaccacgatcgtagatatcacccacaacatgaagatgatcgacgacaagacgttggatggtataagataatccaataattaaatcatctgattgatcaagctcgataacttgatttaagagcgtttcataatacgattttttattattaaattcgttatttttataaagcaactcttcaatgatatatgtatactctgaaggtaaagctttacgtagttttgaacgcgtatattttgaagaacaatatgtgattaaatcaatcaaacgctcgattgtcaggatataccattcatttaactcacgttttgaattaaagtcattcttaatgagctttaatttttcttctggataatacactagtgcagctaaatcatctatttctttttgagatatgttacctgcaaaaatatcgttaattttagcacggacattaccagagccatttcttaatacgtgttggaacgatttatattcaccatgaagatcgctgacgaagtgttcagtaccttttggtaattctaaaacggattctagattaataatttctgttgcaagtttttcaggactatcaaattgctgagatagtaaatccaaatactttttctttaattcactttccgtagattgagacatttgatttcactcctgtataggaaatttattagataataagcagagtaataaaaccgcttacataaattatcgttaaaaagcatcactttttcaatagtgatgcttgaattgttgtaaatttaatttgaaagtaaaattaatgtacttatttagcgttattttttttgaagaatagacgatagagtacataaagaataataatgataagaatcacatacataaaataagaatatgtatggatgccagacattaatacatcgaaactatcgctaagaagacgaccaagtaaaattaaggcaaagttccaaatcgttgtgcctaataaagataacatcgtaaatgttgcaacattcattttattgatacctgctggaatagtgattaatgcacgtaaaacaggaatgaaacgacataatagaactgcccacgcgccataacgtttaaaccagtcgttcgcacgtttcacatcatttcctttaagtttgaaccatttaccatacttatcaacaaatcgataaatactttcctctttaattaaacgacataaataatacaaaataagtaaaccgataaatgaagcaattgttgaaataataaataagactaaaattgaaagacctgatttaactgacattaaacctgcaaatgttaatataatttcagaaggcacaacaggtaagacattttctaataaaataagaatgaaaatggctgcataaccccattgacctataaaatttgtaataatttgttccattataaagttaaaaatcctccgttattaaacattactcgaataaaaaattcatagtaaattcattatataggaatttactatgaattgcttgtgataacataataaggattgtacaactcattttaaggattttaaatattgatgatacaattgttctgcttcattatcatcttcaacgccatagacattcattctaccatctttgaataaggtgatttcataattgccatctttaattagctttgcaaatgaggttgacttcacaatatcacctgggaaatgttcagcatagtcaaaagcagtaggttgatatctaaataggtaggtttttccgcataagctttcaatattctgttgttgtttcgtttctaataattcgtaatgacctttaccacatacgtcacattcatcatcttttaaaatatcgatattcaatgctttataatcaatatgaaatgcatcaagagtaattaacttatgagaaaatccatgaccagataaataacgaatcgcttctgtgacctcatagcttgctacctgtgtaatcacaggcggtaatacgccattaatagcacaactctctgcactggttggaatgtgttttaataaacatttcaaacaaggtcctttgaaatcaatgccgtaaacggtacctttactgcctacagcagcaccatacacccacggaatatggtgtttgtgacaggcttcgttaataagataacgaattttgaaatgatccataccatcaatgacaatatcaggattgacggcttttaaaatgtcctcaatagttgtagagtcaatttcttggtaataagtttgaatgtttacatttgaattaatgtgctcaattttttgcttaactgcgtgaactttagagaccatatggtgagcatcatcttcagtatagagtgcttggcgatgtaaattagataattcaacgatatccatatcgacaatggctaaatgatgcgcacccatacgtgctaaaagctctgcaacgtgacttcctaacgcgcctgcaccaagtattaaaatggttgcattggagagggcattttggccatcctctccaaatgcatgataacgcaattgacggttatagcgttgcattataagaatcctaaaccttcagtagggcttgatgcttgtgcagtatattttactggaatacgtcctgcttcatatgagagacgacctgcatgaatacccaatttcattgcttcagccattttaacagggtcttttgcacctgaaactgcagtgtttaaaagaatagcatcagcgcctaattccatcgcatgacacgcatcttttggtgaaccaataccagcatccacaataacgggaacatttgaatgtttaataatgtaacttaaattaagttggttattaataccacgtccagtaccaattggagaagcaagtggcatgacagcatgaacacctaattcttctaaacgtttcgctaatacgacatcattagaaatgtaaggacatacgatataacctttttctaataacactttacatgcttcatatgtttcaaatggatcagggagcaatgtttcatcatcaccaatcacttcgactttaatcatgtcacatactccagcatgttttgcaatttcagcgatacgaatcgcttcttcagccgttttggcgccagctgtatttggaaaagtaataaagtctttaagattaatatttgctaatggattaggcaagtttttatcatataaattcatacgtcttacggcaaaagtcagcacattcgcttctgctgcttcaatcgcttttgtttgcgtcgcttcatcttcaaattttcctgtacctaataataaacgagatttaatttctaagggtccaattttaaacattttatccgcctccaacaaattctaataattctaattgatcatcttcacgtactgtatgttgattgtagtcttcttgtttaattaaagttttattatgttcgacaatgacacgtttagggtctaattcaagagattcaagtacagaagtaatagattgttctgaatcaaaattgaatgcgtccccattaatgatacacttcatgatttaacctccttgaagcactaaatgattcatatcgatgtggcttaacaccggtgagtatccaattagcgatatcacgaccaataataggtgaaagtaaaataccattacgataatgaccagaaatcacatataaatcttcatcaatacggtccattatcggtatttctccttcagtatatggacgtacaccagaccactgtttaatgactttgccgtgtgcgagttctggtatacgttcatttgcaaagtggtgtaaccaagagataccatcgtctgtattaccaactgaatagttatcaaactcgcttgtggcaccaattaagaaacgatttggatattttggcacgatataacagccattggtcataaatacggtttcttttaaatccaagtggtcattttcaatcagtaagacttcaccttttacaccgactacatctctaggtagtgagtattgagttaataatttagatgtccatgcgcctgctgccacaatgactttcttagcttgtaatgtgccttgtgacgtttcaacatcgtagtacccattttggcgctgaacagattgtacctctgtattgacatatcgcttaatttgacgttgctttaaagatgtaaataaagctttagtgtagtgattggcattaatctgtccatcttgtggaatgtaaatagccatttcacttgatgttactgtgccattcgttaaatgagtcagttcctcatctgaaagaacaatgacactagaatctaaaccacttaaaaattgatactgtttttctaaactttcaacatcttcaggacgattagccactttaattaagcctgaattttgaaactgaatgtcaatacctgtctcagcttctaaatcttgacataattgtggaaagagacttcgtgattcaagagcaagtctaaataaatcagtatcttcagtaaattcattttgagcacctaacattccacctgctttatatgacgcgtgtttacctggtacgtcacgatcgataagtgcaatgtcaaggtgagattgacttaattggcgtgcaatagacatgccaatcacgcccgaacctatgattaaaacatcatgcatctttcaaccactcctttcgcaatagttcaatttgttgtaaagatgcgttcataaaaaaagaaatcgcacaaattcctttaaaaccatgaggtaattgaagaatcgttttttcagtgatacctccaatggcataaatgggaataggaatctctaacacacgctgaatctctgcttttgatcgaggcaattgattaggttttgaaggtgtcttaaaaatgtgaccaaaaaagacataatcaagatcgtgttcataagctgctttaacagattcaattgaatgtgtcgacatactcacttcaatctctggatgcgttgatttatagctaaatgcatcttcatccatttctcgaaaatgaatatgagagaggtgaagttgttcaagtaaatgtacatcactatgaataatgatttttgatttagggaatcctttttctataagtgatgttaaaaatgaagacaaatcacttgatgacatgggagtacgaaacaataaaccatctattccatccgagatatcaagaaaatgttgtacatcatcattggttaaatctttatatttcgttatcgctataaaaatgaacatcactccttattaaacaaaaaaacgctatttccctgcagtagggaaatagcgttttgtttaactttacgatatcctagtcgccactttcctacgccagtacaaactggatcaggttccaggaattataaagttcgttctttactctcagccttaaacaaaggcacttccagtggattgtttattcagttgtgtttaaaataaacatcagcgtttttgcttcaattttattctacaaccttttttaatagagttcaaatacaaaaacaaattagatttgtagcaatatactttttaatcagtaaaacacattttacatagctatgtataaataaaataaaaaatattcaaaaagtaattgtaaacgcttgcaaaacctgttaatattataaaaaatatagcaaaaagcttatgatatggggcttgaaaggcggttaaaaaaagggaacaacaagattgggagttttcattatcaatgtgtaagtagaatcaacacaactttaaagggaagcaggaaaaataattatggtacaaagacaaaagaaaagtaatgttcgttggtatttcgctatcgcattctttattattggggtcattgcatatatggatagatctaatatctcatttattgcacctcaaatgatggaagatcttcacatgacaaagcaacaatttggtttattagcttcattcttctcactaggttatgcattgatgcaagtgccttcaggtatgttagcagagaagtttggtccacgtaagatgatttcaatcgcattattatggtggagtgcatttaccattttaacgggaatgattaaacatcatggtttattatatttagtacgtttcttatttggtatcggagaagcaccaatgtatccatctaatgcagtattcaattcaacttggtttgctaaagatgaaaaagggagagcatcgagtgcgttgttagcaggatcatatttcggtccagtattagcaccagtaattactatcgcaattgttaatgcatttaactggcaagccgtattctacatttttggggcagttggtattgtgattgcagcactttgggcaattattgcaaaagatttacctgagcaacatcgcatggtcaatgatgcagaaaaacagtatatcatgcaacatcgtgatttagtagaaacaactaaatccgtagcaccttggaatcaattttttaaacgcatgagtttctatgccattgcagggcaatatttcgtagttcaatttgttattgctctattcttaatttggttacctacttatttaactgagcaatatcatgtacaatttaaagatatgacaattagtgctttaccatggtttattatgtttattttaattttatctgcgggtgcgatttcagataaaattttgcatagcggtcaaagtcgttttgtagcgagagggttaattgcaattgttggctttatcgtatttgctatctccatcttctttgcagttcatacacaaaacttatatgtgaccatcttttggttatcacttggcttaggtggtatgggtatttcaatgggaatgagttgggcagcagcaaatgacattggacgtaactttgctggtacagtatcgggttggatgaatttatggggaaatattggtgcgttaatcagtccatttttagcaggtgcattagtatcatcacttggctggacaatgacattccaattattaattattccagcggtgattgcagctgtattatggttcttcgttacaccagacaaaccattaattaaagatgaaagtagacatattaaataagatttatacattatccacaaaagtgaaagcctgggacatcatcagttgtctcaggcatttttaatatattgactgtcgatgactgaattgaaaatcaatgttacctctcttcttactactgttttctttttataatatccgggtaaaacgttataattatatttggaaggtgattatatgattattattaatgcgaagcttaaaattaaagaagatgtgcgtaatgactatttagatttaatgaacaaattagttcaaagttcacgtcaagaaccgggtaatacattttatgctcattatgaagatgtagcagaacataacacattcgttgttgttgaaaattataaagaccaagaagcggttcaagcacataaccattcagatcatttcaaagcatttagtgaaaatataggaaaatatgtcgctgaagaacctgtcattgatgtagcagaaacaaaataataactaaacatgccttgtctaagtgatatttgtacttgggcaaggcgtttatcatgttatgataagatggtatgaaataagatggtatgaaaaatgaaaggaaagatagtagtgggacatgtgattgcttcattaataaggtttgataagcctaaaattaatctatggaaaggtatacgccaaggattattaatgattatcccaacattgatagggtatttactaggacattttagttttggtctactcgtagcaaccggaactttggcacatacttatgtatttaaaggttcagcacaatcaatgttaagaacagtcattatttgtacgttatcctttaccatttgtatgatgcttggaacattaactgtcaatcagccagttctgtacggcgtattattattgatcgttactgtcattccattctatgtatttaatgtgttaaaaattgcgggtccttcatccacattctttttagttacattttgcttatccagtaacttacctgacgctccagaacaagcaccgattcgtggcttagcgatttttattggaggaatgttagcgacattagtcgtcattttaactattgtattccaaaaacaaaaagctgaagatcgagcgattacctctgactttcagacgattaataatttaatgcatcactttaatgatgctgaaaaatttaatgatatttcacaagacacagtaacgaaatttaaaaattcagagaaactattgattacatcgactactgcgatgagtgaaaagttaagttctcgctttgaaaagttattgcttcttcatacatcagcccaaggaatttatgccgagttacttgaactaaatgaaaaaaatattcgtcccatccctcaagaactgattgagatgatggatatgattacaagaaatgcctataaattatcttcaaaacgagaaaaatggacgaaaaaagtcgatgtggatgaaccatttgaaagtttgatgcaacacatacttaaaatagacgaaattgcacaattacaaccggaacaaatagaatctgaagcgagtattcgtaagccattatatagtaaacgtatcgttcaaaacttaacactcgattccattattttccgcaatgcattaacgtatgctgttattatgggcgcagctatttttgtatcgttatttttcaatatccaacgttcatattggattccattatccgcccatacagtattattaggattaacgacaattcgtatgttagaccgttcattagcacgtggtcttggaacaattgtagggactttacttctatcagccatactctttttccaacctcatttaattgtcgcagtcattttaatggggctgtctgctatgatgacagaaggatttgtcgcagcaaattatgcttttgcagttatttttattacaacacaagtcatcctgttaaatggtttagcctctggtaatttatccattgatattgcgtatacacgaattgttgacgtattgatcgggattgtgattgcggtcattggtgttttaatcattaatcgaaaaaatgcttcaaccatgttacctactgtgattgcagaagtggtacgtaaagaagcggttattttccaatatttattttcagaaaataaataccaagatacagcacgtgatagaacagaaagtttatcattatctgtaaaaatgaataatatgacacaagtgtacaattcagccaatggtgaattattctcaagtaaagaggccattcgttattattatccaagtatttttgccttagaagaaattagctttatgttaatgcgtgcaatacaagacaaacaacgtcaacgcatttcagaaaaacaaatgggagaatatcttgtcacatttgaaaatgtagcaaaacattttgaattacgcggtagtcttaatgaaaaagaattgacggatttaccacagtataattatttaaaatctgccttaatgaagttacaagataattgtgtagcaacacgtaaagacgttgatcatacaaatcatcagaaaacggtggacgcttaatatcaatgtatgacgtttcattatagcgtatggtggtaaagcttactaaacactatagaggagcgtgacatcatgccttggacaatgaatgattatccacaaacttggaaacatttagatgaattagagcgtaaaaaagcaattgatattgcaaatgcgatgttaaaagatggctacaaagagggagacgctattcctattgcaacaaaacaagcagaagaatggtacaaagatgccagtaaagaagaattagaagaattaaaacataaacatattactcaacatcaaaaagatccatcagcacgacctgaactgaatgatgaagatgttcatgtatattatgaggatcatgaatggaaagttaaaacagaagatgcaaaacaagcgtctgatacgtttagtactaaaaaagaagcaaaacaacgtgccaaagaaattgctgataatcgtggtacacaagtgattgaacatcaaaaagatgaataatgtaatagagtccgagtagcaatgaaacttgctattcggctttttttatgactaaatgactcagactaaatgagtagcgtcaagtctaggttatcatttttagttcacttaagagttagatataatatacagtgatgattaaaggaggcaacaaatatgtacgtagagagaaaaccatcattgtacattgaagagctacgcagtgaattcaaagaaaatattgataagtttaagaatggagatgaagccttcgataagctagtgggtttcgtagagctcgatcatttatattcttctgcattaaaagagattagtacgaagttagatattttagatgacaattttaatcatatttacaaacataatccaattcatcatatggaacgtcgcgtcaaagaaatgacgagtttagttaaaaaattgcaacgtaaaggtttaactatagatgcggaaacagcgaaaaccaatattttagatatcgctggtattcgtgtggtctgtaattatcttgaagatatttatgtgattgagaaattattattaaaacaagaggacgttaaattacttaagcgtaaagattatatacaacacccaaaagaaaatggttatcgcagtcttcatatagtcgtgtcgattccagtctttctagctgatagagtagaggttacaccagtagaaattcaaattcgaactattggtatggatatgtgggcaagtttagagcataaaattcgttataaaaataataccaatacagaggactataaagacaaacttaaagaatgtgcagtagaaatctcagatgtcgaagcaaaaatgcaaaccattcactcagagattcaagataaagataaataatttagtcatatagcgaaacgatagaaatgtatagctattgtttcgcttttttatataaaataaaatgatatatttttatgataaaataaattaatagtaatatatattttttggagttttaaaatgattaaacagaattttaagtcacaacgatatgaactaaaacaatttaagggtgaacacattgaagtcgcatttgccggaaatatggatgcagataaaaccatcgtatttatacatggagcaatgatgacatatcgcattatgttgttgtttgagccttattttagagagaacaaccttatttttgttaactgtccaagtagaggaagaagctctaacattgtaagagaacaacatacattagatgattattctgagcgtatcaatgatgtactttcacaagttatcgaaacatacggtattaaaaacttagtgatcataggttattctatgggaggaatgataggcacacgtttattaaaatttaatacgttacctatttcacatctggtttatttaaatagcgctgcacgtattacaccaaatcaaagtatgttgtcacgcttatttacttcaaatagtaaaagagatcattttaaagatgagatgattgcctttaaaaatttaccgcagtatattttgaaaaaatcttttcataacaaaaataatagtattcgtaacttattttcatatattgcacccattaaaacgattattacagatatcatttattctacaaacgcagattaccttccagatatagaggaaatagagcaatttcctaaacttttatttatttcaggagaagatgacgaaatcattccttacactgattcacaagaaacaatgaaaatgtataaaaaatatggcggtgaagtaaatgaagttatatattctggtatcggacatatcgactttcctgctgtcttggataatttgcctaatggaaccataggtattattgaccacattaaacagtggattcaagaagaataagacgaccggcagactgcataagcaaatgttaaaatcatacttgcttatgacgtagcgtcattagctatgttaacagtaggaggtgaatgatatgtcacactatacgattggagaattggcaaaacagagtaaagtcacgattcgaacactacaatattacgatcgaagaggattacttatagctcatcgacaaactgactctaatcgcagatattatactgacgaacatgtaaagcagcttgaactgattttagtattaaaacaattaggatgtacgttagatgaaataaagacattacttgatgaagatacaaatatgaacacacttaagacactactttcattgagaaaagatgcattacactcaaaagtagaggtgtacagtcatacattaaatcaaattgaaaaagtcgacacatacatttctgagcaatcaagtgcgtctattaaccatcttactgacatagatgacgctatgaaacaagaatataaaataacatactttagaaaaaagatttggataagtgctggaatcttagggattatacactatagtggtttactattaagtctattaggacgttcaactaagccgttgatcgttatatttcccatcttaatcacatatgccattgtgctgacagcaatatatttaaaaaaagtgttatatctatgtctgaattgccagcatacatttaaacctacattaggtgccttcgtgaaagcgaaacatacacctaaaacaagacaactaaaatgtcccaactgccatcaaacacattattgtatcgaagtatatcaaaacgaatcgtaataaacacctggattataatgagctaggtgttttaaattacaaaaagtaagcgcttgcaaaaatagagtgagtgtattactatacttgtatacaagttaacgtattgaggtgaaaagatggaacaacattatccgaaacaatggaaaaacagaatgactacaggggaaagtatcgctgcggaacttaggtttcagattgttaatagtacacttgaacccgatactttactaactgaaaatcaagtggctaaacaattcgatgtcagtcgctctccggttagagatgcatttaaattactgcaaacgaatcaactcattcacctcgagcgcatgggtgcaagggttcttgaatttggtgaacaagaaaagaaagaattatatgatttacgattaatgcttgaatcctttgcattttcaaaattaaagcatattgatagaaaaaaagtgattaaagaaatgaaaaaacatttagaaatgatgaaagtcgctattcaatttgaagatgctgaatcatttacgcaacacgatcttcaattgcatgaagcattgattcacgcctctcgacatcattatcttcaaacattttggaaccatttgaaacccattgtagaagtacttgtattatgttcaatgagagagcgaatgagaacaaataaagaagattttgacagaatacaccgtaatcattcggtatttatagaagcgatagaacgttatgatactgatacgttaagagaagcgtttcatttaaactttgatgatgtaggtaaagatattgaaagcttttggttacaataaatagaaggaagaaggaatacatatgaaatacatgattggagtagatattggaacaacaagtacgaagtcagtactttatgatgaacatggtcaatttattacaaaacatcatattggctatcctttacatacaccaaacgttgatgtttcagaagaaaatcctgacgaattattcgatgccgtattaatgacagtcaaacatgtgattcgcgaatctggggtgcgcaaagaagatattaaactcatttcttttagtgcgcaaatgcatagcttaattgcactagatagtcaacacgagcgcttaactgaaagtataatttgggcggataaccgtgcgaatcaatatgctgacttgataaatgaacaatatgggggacatgacatttataaacgcacaggtacacccattcatcctatgtcaccactctctaaaatcttttggatgaaacatgagcaaccagatatttatcaaaatactgcaatgtttgcggatattaaaacgtatattttctatcaactttatggagaatacgtgatggatcactctatggcttcagcgacaggcttgtttaacttacaacagttagactgggatcaagaagcacttgaattactcggtatttcagcctctcaattgcctcaacttgtaccgacgacacacattttaaaagggatgaaaaaacgttatgccacattgatgggtatcgatgaaaatacaccggttgtggttggtgcaagtgatggggtgttatcaaatttaggcgttaatagttataaaaaaggtgaagttgcagtcacaattgggacatcaggtgcgattcgtacagtcattgataaacctcgtacagattataaaggccgcattttctgttatgtcttagatgaagagcattatgtgattggtggaccggtcaacaatgggggtgtcattcttcgatggttacgagatgaattactcgccagtgaagttgaaacagcaaaacgcctgggagtggatccttacgatgtacttactaaaatagcgagtcgtgttaagccaggggcagatggcttaattttccatccgtatcttgcgggagagcgtgcacccttatggaatgcgaatgcacggggttcattctttggcttaacattgtcacatcaaaaagagcacatgatacgcgctgcacttgaaggggtgttgtacaacctttataccgtctatttagcacttgttgaagtaatgaatgaaacacctaatacgattaaagcaacaggtggctttgcgaaaagtgaagtatggcgtcaaatgatggcagatatttttgatactgatgtcatcgtaccagaaagttatgaaagctcttgtctaggtgcgtgtgtccttggtttaaaagcattgggagacattgaagattattcgatgatcgaaaatatggttggtacgactcatgcacatcaacctaaccaagatacagtaaatatatatcaacaacttgtaacgatattcataaacttaagccgtacacttgaagatcgctatgacgaaattgcagattttcaacgtaaacatattaattaatccacatatttaaatcaattatacatcaaaggggagaagacaaatgggaacaatatggacactagcaagtgttgtcattggaatcgtattactactgacactgattattttcttaaaactaaatacatttatttcattaattattacatcgattgtcacggccatcttattaggtatgcctttaaataaagtaatggaaacgatagaggcaggtatgggcggcaccctaggtcatattgcactcatctttggattaggagcaatacttggcaaattacttgcagatggtggaggcgccaaccgtattgcggatacactgattgataaatttggacaaaaacacgttcaatgggcgatgctgattgcagctttcatcgttggtattgcattattctttgaagtaggactcgtattactcattccacttgtttttaccattgctaaacgtgcgaaagtgtcaccactgaaattaggattacctatggtaacagcattatctgtgacacatggtttcttaccaccacatcctggtcctgtggtcatagcaaaagaattaaaagcgaatattggacatgtgttactatatgggattattattgctattccagtgacgctcattgcaggtccgatttttaatatagttgcacaaaaacttatcccatctgcttatacacgtgaaggggatatttcagcacttggttcacaaaaagaatttaaagaatctgaaatgccaagttttggtttaagtatcctcactgctgtattacctgttattttaatgttattatcaacggttgttcaattagtgactggacatgaaaatgctgaaaatctgtttgaacaaatcatttactttatcggtacagcaggtacagcgatgttaatttcagtcatctttgctatctttacaatgggcttacatagaggaagaaaaatggatgacattatgaaatctgtaacgaatgctatttacccaatcggtatgatgattttaattattggtggcggcggtacatttaaacaagtcctcattgatggcggtgtaggggatacgattgctaagttattcgaaggttcaaccctgtcacctatcttactagcatggattgtcgctgcagtattacgtatcgcactaggttcagcaacagtcgcagcgatttcaacaacaggtatcgtcttaccattattacaacattcagatgtaaatgtggcacttgtcgtacttgccattggtgcagggagcgtgatcttatcacacgttaacgatgctgggttctggatgtttaaagaatatttcggattgaccgttaaagaaaccttcttaacttggtcattacttgaaaccatcatttcagtatcgggcatcatcttcatcttattcattagtttgtttgtataacttataaaagaagtgagagagaaatcaatgaatttcaatcttacttcttatttttttatagcatggaagaatacagtcaatcgctatgaatgacaataaaagaatgataaacttacttataatataaaagacagaatgcgcaaaggagatattcgagtttgaaacagataaagaaagccatcatacctgcggctggtttagggacacgttttttaccagcgacaaaagccatgcctaaggaaatgcttcctattttagataagccaacgattcaatatattgttgaagaagcggcacgtgcgggcattgaagatattattattgtgactggtaaacataaacgtgcgattgaagatcacttcgataatcaaaaagaattagaaatggtccttgaagaaaaaggtaaaacagacttattagaaaaagtacattattctacagatttagcgaatatcttctatgtacgccagaaagaacaaaaaggattaggacatgccatttatactgcacgtcaattcattggtaacgaaccgtttgcagtattattaggtgatgatatcgtggaatctgaagagccagcgattaaacaattaatgaatgtatatgaagaaacaggacattctgttattggggtgcaagaagtgcctgaacatgtgactcaccgttatggcattattgatccattagagaaacaaggtcgccgctatgaggtgaaacaatttgttgaaaagcctgaacaagggacagcaccttctaatttagcgattatgggacgttacattttaacgccagaaatttttgattatttaaaaacacaaaaagaaggcgccggtaatgagattcaattaaccgacgcgattgaacgtatgaatagtgatgttccagtgtatgcatatgattttgatggtaatcgttatgatgttggagaaaaattaggattcgttaaaacgacaatagaatatgcgttaaaagatcctagaatgaaagatgaactcgtcacatttattaaacatttaggattataataattaaagtgcctaagacattgaagaacaagtggtgattcttcaatattcttagacacttcaatctcatcaaaactaaacctaaaaacaggacacaccttattttccgctaaggcgtgccctggattagagaagagataaattgtcgacaaacacttctctaaccataaatcctcaacatctcagaaattttttctgagaatcttttcctcagcgtcttaggacttctcctaagacatttttattatataatataaaatttgaatatcatagatgttgcaatagcaatatttcgactaataatagcactttttgggaaaaataaggttgtttggattacttaaaagaaaagtgaaaaatatttattataaaatttttaatataatagattattagagaaataggtgattggatgtttgagtataaaactaaagaacaagttcataatagagcaaaggaagcagtaggaaaaacaattagagaattaaataatgatgctccagtgttaggatataaaagttcggtaggtgatgcctttgaagcttggtttggaaaaacaaaagatagtgaaagtcgtccagatatggaagaagctggcgtagagttaaaagcaactccttttaaaaaattaaaaaacggtaattatagtgcaaaagaaagattagttttaaatattataaattatgaaaaggtagctaaagaatcatttgaagatagttcattcctttataaaaatggaacaatagaactagctttttatgaatatattaaagatgttgctagagatgattggaaaataaaagaagcagttctatatgagatgaaaaaaaatccagtagattatgaaattataaaaaaagattggaatattatacatgattatataactcaaggtagagcacatgaattaagtgaaggtcttactgattacttagctccgtgtacaaagggagctaattctaagtcagttcgtaagcaaccttattctgatattcttgcgaaacaaagagctttttcattaaaatctggatatatgacttctatattaagaaggtatattttaggagaagaaaaaattgattcaatagttaaagataaatttgaagtgaaaaataaaaacattgaagatattgtttatgaaacatttaaaccttattataattggacaattgatgctttatgtaaatactttaacattgaaagaaaaagtaaaaaccttaattacagaatagcttcagcaattcttaacttaaaaggaaaagtaaaaaaaaatgaaaaattcccaagagtagaagagtttgaaaaagcttctattgtcgtaaaaacagttcaatttaatgaaaacaatataaataaggagagtatgtcattccctacttttaaatttagtgatttagtcaaagaaaaatgggaagatactaatggaaatcctcaagcgacttggcatgattttttactagaaacgaagtttttattctttgtagtaaaaattgaaaatggtgttgaggtttttaaaggtattaagttttttactatgcctgaagaagatattgaaggacctattaaaaaagtgtgggaagatactgtagaaaaattaaaaaagggtgttactcttactgctagatataaaaaagacggatctctttatagaatagaaaataactttattaacaattcagatgatatgatttgtcatgttcgacctcaccaatcaaaatcggattacagagaaaatgggcaatgtgcagattatctaccttctccagctaaatggataaatagacctgaagataagataaaatattcaagtcaatggatgacaaaacaatgtttctggataaataatacgtatataaaaaaacaagttgacgatttattgtagaaagttatgttaaaataatattgtttattttgtatttagagcgaacgatcgttcgctttttatgttataatttaattaatactgttaaaggaggtgctctcatgaatgaaattaaagtagctgagctttttgcaggagtgggtggatttagattaggtttggaaaatacaaatgaaaaaatgtttaatgttacttgggcaaatcaatgggaaccttctaaaaagatacaacatgcctttgattgttataatagtaatttttcaactggagtacatatcaatgaagatatcgctttaataagtgatgaagaaatggcaaaaacaagagccgatatgattgtaggaggctttccttgtcaagattattcagtagcgagaagtttaagtggagagcttggtatacaaggtaaaaagggtgttttattttggcaaattattagatttattcaaaacacttaccctaagtatattttactagaaaatgtagaccgcttattaaaatcaccgtcaagtcaaagaggaagagattttggtgtcatgttatcaacattaaatgaacttggctataatgtagaatggagagtaattaatgcagctgactacggaaatgctcaaagaagaagaagagtttttatttttggctacaaacaagatttagattatgctaatttaatagataaacattcacttgaagaaataatatataaatatggaatgtttgcagaagcttttccgatacaaagtgaaccaaacaaaaatagaattaattctattgccatatcaaaggatattgtagaaatatcagatgaatttagttttcagttttataatagtggcatcatgaaaaatggtaacatcttaacaattgacactattcctaaatatgaaaaatcaataacgttaggtgaaatagtcttaaatgaagtagatgataattatactttatcggaagaaaaaattgagaaatttaaatacttgagaggtcccaaaaaaataaaaagaacttctaaagatggtcatgaatactatttttcagaaggtggaatgtcagaattcgatgctttggacttacctgctagaaccatgttaactagtgaagcgtcagttaatagaagctctcattttttaaaaattaatgaaacatatagaactctaactcctatagaagcagaaaggttaaatggttttcctgataattggacagatacaatgccagatcgcatgagatacttttgtatgggaaatgctctagtagttcctattgttacaaggattggtaatcaaattgaaaaaatagaaaaactgactaaagataaatttagtcaattaaaacttttttaaaacaacactatttttagtgttgttttttgtttattaccactaatttaagtgtaatttaataatataattgtaaactacatataaagttggtgtatataatggataaaagtaatatagactatgatttaaaaaaagaaatagaaataggcaaatttttagataaatatttttataaaaatttaaatagtattttgaataattgtgaaattaaagatattaaaagaacccatgattctaaaaaacaacatcgtggaatagatttaactattgaatatagtcatggaaaaaagttaatattgatgagaaagcggcagcaacatattttaataaagggctaccaaccttcgcattagaaatatttttttataataagaataatgaattaaaagagggatggctatttggagataaatatgattcaacagatagttacttatttatatggggagaaaacactggaaaagagatttttgcagataacatcactaaacttgaattaggctctataaaaaaatctgttttaagacaagatattgaaaaaagatttaacattaataaagagaattattataatatttgtttagataagatgaatagtatattaaaagattctaaaaataaagatagtaaagaatatgttaaagataagaaaaatgaggcttactggaaaattggtaatgttaaagagagaccctttctaatgatttataaaaaaaatatgttaaaagaaatatgtcaaagttggtttgtagtaacaaaagaagaagtaaaacaaattaaatagaagacctagatatctcattctatatctccgacattcctgagggaacaggataaggagcaaattgcacgcatttttctattccctaacatacttatcatttaaattcaacttacatgtgaaaaaatgaacaaacaaattttcaaattattgaactatttgtgaaaactatcacataccccttttaaaataaaaaaaagcgtgtatgataagaattgtaaggaataagtaattggagtgatactaatgagaaaagtaatagaaggcgttatcttttctgaagaaggcagctacgatatttatttaaaaacaggcgtaaaccaaggattaattagtgatataaaagatggatatatgacaattgattcaatgtcttatttagacgcagaacgtttatatttctatggtctcgaacgtaaaacactagttacaaattaaaatacaaaattgaatgacctcctataacattcaagaacgtatcttatcatgccctcgttggtgagcagtcgagggcatatcctaaatatacccccaatcatttttagataatgtgttgaaacccgcatctcacttcccttgatgcgggtttatttttatgataaagatttaaaattgttcttcacttcattatattggtactcttgattatacaatttgaacttgtagccatcttcactagaaaaaggcattcgaacatttggaatgtgatccattcgtgcaataaattctctttcttggcgtgtacgttctttgacactcatgtgtaaccattcttctttagtaaataaatcttcgaaacgaaatgaaaaacttgtgcgacctactttttgacgtaatgcttgaactaatggactaaaatctttcgcaatcacagacatcttctattcccctttatttaaaataatatatatcttcactttattacgtttaattttaaattacaatctatatttaagactttaaattgataacgacgtttatgtataaagaattatggaaatggaatgaataaataacaataaaggatgatgaatatggctaaattaacagatacagttgcgataattacaggtgcgagtagtggaattggtgaagcaacgaccaaacgacttgctgaagaaggtgctaaagttgtgctagctggtcgtaatgatgagaagttacaacgtgttgcagaacatttgaatgaaggagactatcttattacgccaaccaatgtgatgtatcgtgatgatgtggatgctcttgtagaaaatgcgattgctaaatttggaaaaattgatatctttgtcaattgtgcaggcattaacttatcttctaaaatcacagattacaaagtagacgattgggataaaatggttgatacgaatattaaaggattgttatatggtctgaatgctgtacttcctcattttgaagaacaatctagtggtcatattgtcaatatggcatctatttcaggctttgaagttaataagacgagtgcattatacagtgcaacgaaatctgctgtattacgtattgtagaagctttagaaaaagagcttgcgcgaacgggtattaaatcaaccagtattttaccaggaatggtagatacacctatgacagaaggatatgactttggtgatagaaagaaattagatcctgagaatatagctgatgcggtaatctatgcagtgacgcaacctgcacatgtaaacgttaatgaagtcgtcgttcgtccagtttaaatctaatgagaataagagcgtttcttgcctatggtaggaaacgctcctttttacccttcaatattagtgttgaaatgttacacttatattgaaagatcatataacttaaaagggtgataaagtgatgaaacaacgtttatttgaattgttagatgtattagttaaatataatacggagagtcctcctggacgtaatacggatcctttacaagatgacattgaacaattattaaaaacactaaattttgatattcaacgtgaacatttatatgaaaatgatagtgttatcgtcgcaacattaaaaggggaagatgaggatgcacctaaattaattctcaatggtcatgtagatgtggcgaatgtggacgatgattctaattggcaatacccaccgtttcaactgactgaaaaagagggatggctatatggtcgtggtgtgagtgatatgaaaggcggtatggcctcgctgttttatgtgcttgaaaagttacatcaagaaggacgacgacctaaaggagatattgtcgtgcaatctgtagtaggagaagaagtgggtgaagcgggaacgaaacgcgcatgtgaaattggtcctcaagcagatttggcattagtattagatacaagtgaaaatatggcacttggacaaggcggagtcattacaggatggattacggttaaaagtaagaataccattcatgatggcgcacgtagtcaaacgattcatgcaggtggaggtttatttggtgcgagtgcaattgaaaaaatgaccaaaatcattcaagcactgaatgaacttgaacagcactgggcagtgatgaaatatagtcctggtatgccacccggtgcgaatacgattaatccagcagtgattgaagggggacgccatcctgcttttattgctgatgaatgtcgtttatggattacggttcattatttaccgaatgaaagttatgaagacgttacaaaagagatagaagcgtatttaaatcgtgttgcagatgcagacatttggttgagagagaacccgttacagttcgaatggggcggtgaatcaatgatagaagataaaggagaaattttcccaagttttacgattccattagaacatccaggctttaaacaattacaagatgcacattatcacgttcatcacagtgaaatgaaacatggtatgagtaccacagtgacagatggaggttggactgctcattttgatattccaacaattttatatggtccaggtagtttagaagaagctcatagtgtagatgaaaagatagaagcacaagaacttcaaacttatagtgatgtgttatatacattcttaaaacactggtatgaccatcctgagaaataaattaaaaagccaagtcgtgctgatgaatgacacgacttggctattttatagtcacattatttttttaatgtgtttcgaagacgattgacccagctagctcttcttttagaaacgacgggcattcctgaaggctgggttgcctccttttttagctttttaccatacttaactgcttctttcatcaagtaagcttgtgaatttaatggagataaatcattttgaacgtaatgatactcaccatactgatcttgataacgtcctttttgattatcagataattgtaaattcataaagtctacaagacgtttaccgatttctttatcttctacagggaataagatttcaacacgtttaatcatgttacgtgtcatgacgtctgcagatgataaataaatacgttcgtcaccattattgtagaagtaataaatacgagagtgttctaatagacgacctacaatacttacaacttcaatattttcgctgacacctggaatgcctggttttaggcaacagataccacgaataataagttgaatggtaacacccgcttgagatgcttcaaataatttttcaatgatggccttatcagttaaggaattcattttcatcataattttaccgttaccatgttgacgatgacttgcaatttctttatcaatacgatcaataaagacgtcacgaatatcaaatggtgcgacaattaatttattatattcaggtttaactgagtaaccacttaaatagttaaagaaattaatggcatcttcagcaattaatgtatctgtcgtaatcacacccatatctgtgtatagttttgcagttttatcgttatagttacctgtacctaagtgtacgaatgaagttaatttgccaccgatgcgtttaacgactagagcaattttactatgcgtttttaaatgagtcataccataaataacatgacaacctgcatcttctaacatacgtgcccaatgaacgttattttcttcgtcgaaacgcgcttttaattctacaaggacagtcacttgtttaccattttcagccgcttcttttaagcttttaataatgggtgaatctttacttacacgataaagcgtttgtttaatcgcaatcgtgttaggatcttcagctgcttcacgaataaagtctacaataggctcaaatgattcgtatgggtgatggaaaaagacatcacgttttaatgcaagatcatacacattattgttacctaatgaacgtggaatttgtggtgtatatttatcatatgttaagtattttaatttatgggatagatgatcaactaagccaaagataaatgttaaatctaaaggtccattaagtaagtaaacgtcttgttcatctacttctaacgtttctgttagccaacctaaatcttcgatagaagctgtacgattgtcgacttctaagcgtacagcagaaccacttttacgttcttttaagaaacgttcgatttcgataagtaagtcttcagcaccatcttcatgaatcgttaaatcagcatttctagtaattctaaatgtaaaggtatttaatacttcatagcctgtaaataagtgattgatgaagtgtgtaatgacatcttctaccatgactacatattgttttgaaccttcattataagttaagaatctagggataagagatggaatttgaacaatagctgagttaatggcatcatctgtatcgatatctacgaagatatttagacttttattatttagttttgggaaagggtgatatgcatctataccaagtggtgttaacgttggtaaaatcgtgagtttaaaatccctttctaacttacttaaaatagagtcagataaattttctggtttacacatcacaatgtcataattgcgtaattcttcgataagttcgttatagcgttcatattgcatattgacatattttttagctttttcttgaatagcatctacttgttcttgtggtgtcatttgtgttttattttcaggtttatcaaattccatttttacttggtcttttaaaccagccacacgcaccataaagaattcatctaagttcgaactaaagatagatacgaaatttaatttttctaatagtggattgttgttatcataagcttcttgtaatacacgatagttgaaatctaaccaactgagttcgcgattattatagtacttcggcaagctaatatcatagtctcccaattgagtttgcatattcaaaatacacctcgtcatttcttcgattatcaatctttctatttataaacatatatagtctatgacagaactatctactcataatatagcatacaaattttaagattttgtaaagacaatggatactgaccctttaagaatcttttcaatatgctttttctgtcttaatgcttgatatttctcagcaatcggttcgccttcagtataatgtacgatcagttcataatcgtcattgccttttttcgtttcttttaaactcacgtcttgaacaaagctagtttgtgaaatatttaaagcattcacaaatttaataatgccacctaatgcttgaatggtttcaatttccttattactaaaccaatctgtttctttacaatagaacttaagtaaagatttatttttaaaacttgctaaaagggcgagtttaacgcgatctttatgtgtatagccattaatcattgagttcgcgataatataatacgtatgtggagaacttgaatctgaatcaataaatctacctaaataataaatataggttgcttcttcaaatagacgttgctctgtgtcattaatctttaaatcacctaaattcattaattgttttaataaagattgtgctaattttaaacgaccttgtgagctatgttcttcgatatgatagtcatgtgctaagaaataaatcgcttctttacgcacattatgtttgtcaaatacatctggatagcgtgagcgaatttgtttaataatatagccttcacgtaagccatttcttgaaaatgtgaattgcttagcatctatttttttataaagtgtcttaaatactgatactgcaggaagaataatatctgcacgatcgcgacttaatccatctaggttatttaattcatcacgtgaacttttacgtatcatgttgtacacttcatcaatatctttatctgacattgtataattgtgtacgccacttatagggtaagtgtgttcagattgatgaatacgtgctacgttacgtgcagaaccaccaacgccgactaaggcaatctcttgatctttaagccaatccaatgtactaaattgttgagataaaaatttctccatatctttgatcgcacctttatcattgtggtctttgccatcaaagaatttatgttttaacgtgactaccccgaaaggaaaactatgtgattcaaatagttctttatccttaaataaagtaacttccgttgaaccgccaccgatgtctacagatacgccattttcaatttcagtggtatgagtaatagcatagtaaccataatatgcttcttctttttcaggaataattgagatttcaatatcaagttcatctttcactcttttaacaatgtcatccttattctcagattgacgaatcgctgctgttgcgataggatgtaatgcttttactttaaatttttcagatacagatttaaaactgcgtaatgcttcaatgagtacgttaatgccttcttggctcattttattttcttttgtcaagtattgactcaagcgagcaggcgttttaatgttgagcaattcatttaatcccgcatctttgctaaatctaaagataactaatctaatcgtatttgagccaatatctattaatcctatacgttcttccatcatggcctcctaagtctttcaatacttcctattatagttttattttacatgaattttataaatagaaaaagatacgaatcctatttgcatttctttgaatataaaaaagaattcaattgtaaaacgatttcatttttagtataacgtttaatctaaactgtttagtggaacaataaggttgtattagaaaacaagttcactaggagtgtgacaagatgaaacgtttagaagataaaattgcagtcatcacaggtgcaagtacaggtattggacaagcatcagcaaaagtgttagctaaagaaggggcacatgtcttagcacttgatatttcagatgaattagaaaaaactgtagatgatattaatcaagaaggcggtaaagcgacagcttataaagttgatatctctcaagatcaacaagtgaaagattttgctgagaaagttaaacaagactatggtcacattgacattatcttcaacaatgcaggtgtagataatggggcaggacgtattcatgaatatccagttgaagtatttgataaaattatgtctgttgatatgagagggacgttcttagtaacgaaattcttattaacattaatgttggataatggtggttcaatcattaatacagcttcattctcaggacaagcagcagacttgtatcgttctggttataatgccgctaaaggtggcgtcattaatttcactaaatcgattgcgattgaatatggacgtgaaaatattcgtgcgaacgcgattgcaccaggtaccattgaaacaccacttgtagatcatttagctggtacatctgaagatgaagcgggtaaaacattccgcgataatcagaaatgggtcactccacttggtcgtttaggacaacctgaagaagtaggcaaattggttgctttcctagcatcagatgatagttcatttattacaggtgaaacgattcgtattgatggtggtgtgatggcatacacttggcctggtgaaatgttaagtgaagataaatggaaacattctgtagaataaatcataatagatatattagtgtttaaatgtgggagatggcttcaatgtgaagctgtctcttgctttttatgtatttagataaattaccatattttataaaaatgttataatgttgatgtcgtctttcctttagacggtcgtacgtttaaagggggtgaagttatgacgttaatatttgtactcgttatcgcacctatattaaataggtggctcaatatattgtttgattattggtttgaacaatataagaataaaaaagacggcagataatccaatacacaaagaacccctagtctagggcaatagactaggggttcgtatcgttatgacgttaatactcgttaatgtgatattaacataagtagatgtaatatttcaatattcaaattaccatttgatttgattgtacgtttggtcatttaaagaacgtacaatttcagtgattaatcgtactgaattttcataatcatccgtatggagaacagatacatttgagtgcatatagcgtaatgctacaccaatggcaattgttggaataccatcgttagcaacatggatactaccagcatctgtaccaccgcgtggtgttgtatcccattgaacagtaatataatgtttttttgccacttctttaatatgttgacgtaagccttgatgtgccacatttgaagcatccattaaaataattactggaccgtcaccaatggctgtatcactaccatattgtgccattccaggtgtatcgtatgcgacagcaacgtcgactgcgatagctaaatcggggttaattttatttgctgcgactttagcgccacgtaaaccaacttcttcttgtacagtgccacctgcatataaattaataccaattgattcatctttaagattgttaagtacgtcaatagccagtgcacaaccgtatcgattatcaaatgctttggcagttaaatatttaccatttgcaagttgttcaaactcactataaggtgtaatcatatttccaatttcaataccgtattgttcagcatctgctttacttctaacaccaatatcaataaacatgtctttgatatcgatagactttttgcgtgcgtctggttcgagtacatgtggaggtttagaaccaataatacctcgtatttctttaccatcgtcagtagtgatggttactttttgagataacatcacttggctccaccaaccgccaataggttggaatttaataaacccattattgtcaattttagtgacgatgaatccaatttcatctaaatgaccagctaacattaatgatttagatcccgttttactttcctttttaccaaagataccacccaaaccatcttcgataatctcatcactaatcggtgttaaatagtctcgcattttttctttaacttggtattcataaccagcgataccattaacatctgttaatgtttttagtaattcgatagattctttcatacaatgagtcctcctaaaatgttgttaagtgtattgtagcatggataaaatgaattttatgaaaaatagtttatcatatctatgtaaattaaatgtatcctattcatagttagtaagtgatataatttgtgtaaaattaaatatggggaagtcgatgagtatgatgaaaaaagttttaacattatttgtgttgttagtgttaagtgtgagtatattaggggcttgtactcaatcacgttcaaaaacatacgaaggtgatattgagggtaagcatgttcttacaacattaacttataaaaataataaggtgattaaacaatcaactgtcagtattttaaaatatgatgacctcggaatgtctaaacaagaaggtaaaacatcttttaaagattatcgtccattaaaagggaaaaagggcgtcacatatacgctaagtagtaagcatcaaaaaatagttgaaaatatagatattgattataacaaagcaaatttaaaagacgttagtcgttactttgcattagcacattattctaaaaactataaaaaagtaacaatggacggtacggtcaaagaacttaaaaaaattggattccagaaaaaaagcaatatgaatgaagaataatataaaagtgagacaaccattggcttagatggattgtctcacttttttgttgactattgaataagttttaatttataacttgcgatatcttcaatatgtccattttttcttttaatcacaatatgatcttctgtaatttcgtttgggcttttaacacctactgcagccgcaacattaaataatccttcatgtaaactcgtcacatagtttgtgacacgatattgcttttcttcaacaattaaagctttttcttttttaggatcagttgttgcgacgccaactgggcaagtatttaaatgacattgttgactcataatgcaaccaatgctaatcatcatacctcttgcaatattacataaatcagcaccaagtccaagtgcaatggctactttatcaggtgtaataagttttccagatgcgaatatcttcatatatttgcgtgcatcataacgttctaaaacaccagtaacgattggaagggcagtaaaaagtgggagaccaacaccatcttgtaattcttggaatgttgcgccagttccaccttcaccaccatcaacagtaataaagtttggataaatagctaggttaatcatttcttgaacaagggcttcaacttcatcaactctgcttacaacaattttaaagcctacaggtttctgaccgagcttttgcaacttagctacaaattctaataattctttcggattattaatgaaatcgaaacggttaggcgagttgacggtctgatagggttcaatatgacgaattttagcaatttcttctgtaactttattgccctccatatgaccaccacgtgtcttagcaccttgtgcaagcttaatttcaaatgctttaacttctttatagtttgccacatttaagaaagcttcttcactaaaaccaccgtctttatctctcacgccgaataaacctggtccaatttgataaataatatcgcagccacctttaagatgatattcagataatccaccttcccctgtattcatccatgtgccagcacgtgcaagtccttgagataatgcagtgatcgcgcgaccacctaatgagccataactcataccagattggcctactaaacgtttaattttaaagggatgtgctaattcttcgcctataataactgcatgatcatctgataaataataaggatcgatgtgtttgttctcacgatgctcttcacgcttaaacaatcgttcattatcgattgaataaataaatgttgaaatcattgaatggttatcaatttgaagttctgatttttgtaatggaaacatagcgtttcgaatataaaagccttcttcatagattttttctgtaccaaaactagtcattcttgaatgatatttacttgctaaaacgatatcagtatattgatttcttgaaaatggttttccttcggtatcatttgcaaataaatattgacgtaattctggtcctattttctctaaaaagtaacgtactctgcctaatacaggaaagttacgtaacacactatgttgttcttgtcttttatctttgaataaaagaaataatccaaccattaatatagaaagtaacaccatcataataagaatattaactataaattgcatgacagtaagtaatgttgtcatgcccatccccctcaattccctttatactgtaaatcttacatcaaaaaattttatttacaaataaaaataaatagatttaatatttatctttaaatatcaaataagggaaaagttagaatcccttatgacaataatgtgtttaaatgataaagtactatatgcgtagatagttgaggtgatatatgaaaaaagaaaaagatgtgattacacaagtggtatcaaaaaatcgatggagtagtcctaaaataataaaaaaggattttctactcattcctttatttatctttttccaaattttaacgcctattattattgtttttggcgtattaggtgtaacggctatggttacccaacaaccaccgccatcttatttatataatgtgatgctaagtttaagttttgtgattgctcaatttattgtgttaggattatttttcacattacataagttttatattgcgaatgttgtacgacgacaatatcgtattgcgattcatcagtatttgaaatttatgatcatcatcgtaatggttagtgtgatgttatattatggttttaatgcattggcacacatattaccgcatccttttggctatgtagacacacaagcacaacgtcgtttagaaggattgtttattcatccaagtgcgctgatattcacttttatttcagtagtattattacgccccttaattgatgagttactatttcgtcatctgttgattcatgaattaggtaaaaaatttaatcttttagtaatgatgattgttagtgtgttaatagaaactattgttcaagtatatgatttaatttcaatattggaagccatcccttacatgattatttcaataggtgcagtgatggtatatatgaaaagtgggaaaaatttagtagcctcctatctttatcatagtactgtacaattcatcatatttattattacaatgattgataagcttgtttaaatagaaagaataggagagttatatgacttcggaacataatgatacatattaccaaacctcagaacagcgaccgataagaaatgaatttgattcaaaacgtattgttaaacgtgatttttggctcatacctacatacttagtcatgaatattgtttttccattgattcttacatttattgtgatggcaatgatttcaggcatcacaggtggtcatatatcggaaagtaaatttacaaaatattatttaggatacgcgcaagtctttacgttaattggtcaatgtcttgtattattagtcttttatttaatgcatcgcaaaaccattattcctattgccatctcacgttttaaagctttaaaaaaacatattccactcattattattgtgatggtggccctttatgtattacaaggtgtatatggttatttagtagaatttttaccgaaacaatatcagtttgatgatacagaaaataacaaaatgattattaaaatgtttgaaatcaattggctttggcctgttttatttttagatattgtgattattacacctgttgtagaagaattattattcagacatttgttaattcatgagttaggtaaaaaattaacgtatggtgtgatgtatgtcgtgtcagtactcggatttgcaggattacatatgacaagtgcatcatcaccatttgaagttggtccttatataattatggctacaggatttgttgtggcatatcacttaagtggtcgaaatttagcgatgacaattacccttcatatgataaataactttgtttcttttatagcgattatgatgagtatcatttggggttaagggtaagaggtagagtcattgaaattcaaaaaatagtaacattgaatttcattactttgcctctttttttgttatgataaaaaagaatatgtcatcccattaaagagtaaagataaggaggaagtgcttgtgttattagaagtaaaacatctgacctacaaagccgatcaacgaacgatactcaataatattaattttaaattagatcaaggtgaaaccgttgcagtggttggtccttctggaagcggaaaaagtacattcttaaagcaactcaacaatttaattagtccgactgaaggagaattattatttaaaggaaaaccatatgatgagtacagtcctgaagaattacgttctaaaattagttacatgatgcaacaaagtgaattatttggaacgacagtagaagataatatggctttcccagcattaacgcatcatgatcaatttgatgaagataaagcgaatgatttacttaataaagtcggcttgtcaaactatagtctagattcaaaagtagaacatatgtctggtggagaacgtcaacgtattgctattgcacgccagttaatgtatcaaccagaaatattacttctagatgaatcaacgagtgcacttgatacgcaaaataaagaaaaaattgaagatattatctttaaattagcagatgaaggcgtcgctatattatggattacgcatagtaatgatcaaagtatgagaaacttccaaagaagaattactattaaagatggtcagattacaaatgaggaggtgttaagtcataatgagtaatacagcactttgtttaacagcattattattattaattcctattattatttcatataaagaaggcttacatattatcaaagatttagtcgtcgcttcgattagagcggtggttcaattattaattttaggattgatattagaatatatttttaaaattgatcaagtatggatattattgattgcagtattagtcattattattaacgcttcttggaatacaattcatcgtgcatcgcctgttatgcatcatgtgttttggatttcttttgtttctatatttatatcaacagcaattccattagcatgtacagtgcttgctggtgccatcgattttaaagcaaatgatgtcattcctatcggtggtatgcttgcaaataatggtttaattgccattaatttggcatatcaaaatttagatcgtgcgttcgttcgagatgtagatgatattgaatctaagttaacattagcagcaacgccaaagcttgcatctaaaggggcgattcgtgaaagtattcgtttggcgattgttccaacaatcgattctgtaaaaacatatgggttagtgtctattccgggtatgatgacaggattaattattggaggtatggcaccattacaagccatcaaattccaattacttgttgtatttattcatactactgcaacgattatgtctgcattgattgcaacgtatttaagttatggtcaattctttaatgcacgtcatcaactcgtagcacgtacaacgaatataaaagacaataactaaatctcaatgacacattttttcgcacaaaagtttaagaaattattatataatgaaacagttacgaatgataaaggttaccattgcgtaactgtttttttataccaaaatatagaaagaaaggagttctatgcatgtctgtcatgcgagtggcaaccttcattattagtgtgtttatcgtcggtatggttgagatgatggttgcaggaattatgaatttaatgagtggagatctcggtgtctctgaagcgattattggtcagcttgtgactttatatgcattaaccttcgctatttgtggacccatacttgttaagcttacgaatcgctttgcagtacgaccggtcttattatggacactcgttgcatttattatcggaaatgccatgattgcgatggcgcctaactttattattttagtgattggacgtatcttatcttcagcagcagcgtcactcattattgttaaagtcttagctttaacagcgatgttaacgatacctaaaaatagagggaaaatgattggtgtcgtttatactggatttagtggggctaacgtatttggcgtcccaatcggtacgatgattggggatgcaataggttggagatttacgttcttatttattattattgtgagtgtgatagccggtgtactgatgatggtgtatttaccatcaacatcagaattaaatcaagttcaacgtcaatggggttcaacttcaaataaacagctaaatacatctaaaattttaagaccagcggaggtagtcaaatatttaacgattacttttttaattttagtagcaaattctgtgacatttgtatatattaatcctcttattttgaatcatggtcatcaaatgggatttgtgtcattggcgttattagtgaatgggattgcaggggtgattggtacgtcgttaggtggcatattagcagataaacttagcagtaaacgttggctaatcattgacttttctatttttatagttatgatgttgataatgaatcttattttgcatactgttaccctattattaattggattgtttatatggaatattgtacagtggagtaccaatccagcaattcaaagtggtatgattgaacatgttgaaggtgatacgagtcaagtgatgagttggaatatgtcgagtctgaatgcgggaataggatttggaggcattattggaggactcgttgtttcaaatatctctgttcaagcagtcacgattgtgagcgcgatggttggagctatgggtcttattattgtcttaagtttaaaaaatatgtcttatatgagaaattaaggaggaagtggaacagaattcattttgaattcattgttccgcttctttttatttatatatataacaataaggtgtttgaggagaataagatggccacggcatagtgtggtatgtcgcaaaatagattaaatcatctatcatgtgtttactgagatgacgttcatgttctaatgagttcacaccatgcgcttttaaaatctctaattttccaaaccaaaacactaaatctaaaatatgataagcagattgaaacggtgatgcattagaaaggcaccaatcaaaacgtaatttccaacaatggggattgttgtcaagttgatttaaaaatgaaattgcaggtgtttcgaaataatgagttgtcaccatacgggcttggtctttaccagtttgagcttgggaaatgtgaaggtgtatatcatttaatttcatgacttccacaaagcgctcagatgatagttttctagattcattacgaatatagatattgccttcttctttcgtagtacctataacaaccggtttagtaaattgagaaagaggacgagacatgtttgactcttgaataggtgcataaatcaattcaagaccttttgattttccgcgtgatgcttcatcataagccattaatgataatatatctaaagttgttaagtgagtcattctttttttaggaaaataagcatctttcagataggcaaaatgggctgctttcttttgtcctaataaatgagaatcaagacgtagcgttccacttaataacatcacttgatgatagtatttatctaattctggtcgttgcattaatgccataatactcatactgccagcagactgtcccattaatgttatattgtttgaatctccaccgaaatagttaataaacgtatgtacccatttgagtgcattaatttgatcagacaaaccattgtttttattataatcgctattgaagtaagaccagtctaaaaaccctaaagcacctaaacgataattaaacgtaatgacaatgacatcatattgtgcaactatatgttctggtgtataaagttcctgagaaccatgtccgttcacaaagccaccaccataaaaatagataatgacaggcttatttttatattgattattttgacaccaaatatttaaatataaacagtcttcactttgattaaataattgagcatgtgatgagaagaaggtttcgagtttgttatgtggttgtggtggtatagatttaaatgatgttgcttcaatgatcttttcccaagtttttaagcatttcgagtgtttaaatcgatgttcattgatgggttgattagcataaggaatcccgagaaagtaattaattttccctttagtatagcctttaatatctccgccatgtgttttaattaaagtcaacagtatcatctccatacttatcttatatctaatataacattaaaaaaaacgtctgaagcaagatgagactattctctaacttgtttcagacgtttgaatgattattcgttacctttagcagctgcttcagcttcttctggtgagccatctttcatttttttattgattttcttagcacgtttgaagtaaatactattgaagtgacttgaagaaccaattttataaaaaatgagggacaacacaataatagcaataaagtcatatgggtagtgaatccagttcatacctttaaattctttactacctataaatgacatagcagctaataaaataagatagacaataatccataagctaccgccaatttgctttttagtatttttccaattcattttatattcatagaagaagtaaattggtaaacctaaaataataattaaaataacttctgctgtagtaggccacattgcccaataaatggccagtgatgctaatacgaatgataaaggtgccatgatttttaataatttaccacggaagggacgatgcaatttaggtcccattttacgtaacgcaataacggtagtaggacctgtaagataggctactaatgttgcagttgaaataacagctgcaagtaccccccaatcgcggaataacgttaccatgataatactcatgacagcattaaatgcaatcgcaacacgtggaatattatattttgaattaatttttcctaagaatttaggaatatgaccatttttttccatagcgcttaatacgcgaccagtaatggctacaaatgacacaccagtaccaaatggagatactacggcttcaatataaagtaaaatggctaaccaattaatacttaataaaattgccatgtctgcaaatggtgaattaaagttaataccgtgccaaccatgtgaatgaatcattgattgtggcattgaagtgataaatgtactttgtaagataatatataaaattgcacttaatgttagtgaaatgccgataccacgtgcaatgtttttctcaggatttttaatttctgagcccatattaatgatcgtttggaatgcattaaatgagaagataatacctgatgttgttgttgctgcaaagataggtgcactaccatatggcataaatgtattcaaggaatgaccatagtttcctgcatcaaaccctgagatcgttaacataataattgttaggagtggcacacctaatttaaatacagaaattaaacttgtaaatgatgttaataattttacagaccaataatttaataatgaaaagacaatgatgataatgtaaacaacaaataaaccaattgtacttacagaaccattatgcatcaatgcctgagttggcttagcccagtcccaaggccaagagcttatatattggactgcagatactgcttcaattggaataatcgttacgagtgatacccaatttgcccatgcagcaatgaagccaagtaatgacccatgtgtatattgagcatagttactcattccaccggattgtggaaacattgttcctatttcaatatagttataagaaatcgttccaataactatgaagcctatgacccatgagataatggctgctggtccagctactgaagatgcttcccatgctccaaagagccaaccagaaccaattaacgaacctaaaccgagtaacacaagctgcgttaggctaattttattatcgcttttattctttcccataaatactccttttaatttattttattttttataaaaaaacacgatataattatacgcttatcatttaattagtcaaactaaatatttaatagatttcaaaatattattaaaaggagtttattaaatttttttctataatataatgatgataatgttatgaaaaagtatgtagtgaaaccgatgtagaaagagaataaatgataaataaaaatagagatgataggcatagaatcgtatgatttgaaataatacaaaaaactctgtaaagaaaacttctttacagggttaaaacatttaattaatatttttggtcaccatttaatttaactaggattttagcttgtgatttatcattaactaattgattgaatcctgattcaacgatgtcagctaattcaattttatctgttacaacgctcttaacatctaagctaccatttgcgattaaatcaattgtttgttggaatgttgttggtgtataagcaatagtagacgttaatttaacaccagagtttgtcaataacattggatcaaagttaacttcgtgtgcaaagattgaaacaatgacaacactacctcttgggcgtgttacttttactgattgtgctaatgttacgccaacaccagctacttcaaaggttacatctacaccgttttcagtgtgttcgtttacgaattctagtggatcagtatgaccagagtttacaacgtgagttgcgcccacctctttagctttagctaaacgttcttctgataaatcaaatacaaagattttactagcaccagctgctttagctgcaacgactgttaataaaccaattggacctgcaccaaagatagccactgtatcaccaaataataagttaccttctttaacagcttgcactgctactgctgttggttcaactaatgcaccttcttgagcagacacattttcaggtaagtgatacacattgtcttcaggtgcattagtaaattcagcgaaaccaccatctgaacccaatccgatgaatgtatacccatcatataagtctaaattttcttctttttcacgtgcagaaacagttgggtttacaacgacacggtcgccttttttatattttgtaacgtctttccccacttcttcaacgatacctgagaattcatgtcctaaagttacaggtgctttttgacctaagaatggatcaggtttgtcagttgaaataaatactggaccttctaaatattcgtgtaagtcagtaccacaaataccagcccaagatactttaacttttacctcgttatcttttaatttttttggttcacgatcttcaacgcgaacatctttttgaccataccatactgctgctttcatgatatataacatccctttcataataaaaacactttacaattatagattaatactagtaactcagaaattcaaatatatataaatgaattgttacacactttagaaaaatttgacaattttgcgaattttaattgtaggcaatataaaaaggttagaatgtactgtctacaatgaatagttgtatataaggaatattgaaattaaaaacttaaaaaaataattaggtaaaaaaattaattattacgtataaataatgtttcaaaaaattataaagggtatataagtataagtggtggaattttaacgatttctattaaaattcaattttttaaaactttattacgcaatggccatagggttcttgattgagacaatcaaaaatagaatactttggcttttttgtatttaaaattttccatcattaatacgatagaaggggacatcctatgacgcttagtataaagaagcttactaaaatttattctggaaataagaaagcagtcgataatatttctttaaatattgaagctggagaatttgttgcatttattggaacaagtggtagtggtaaaacaacagcattaagaatgattaatcgcatgattgaacctacagagggttcaattgaaatgaatggtaaagatgtacgtagcatgaatccagtagaattacgtcgtagtattggatacgtgattcaacaaattggattaatgccacatatgactatcagagaaaatattgtgctcgttccaaaacttttaaaatggtctaaagaaaagaaagatgctaaagcaaaagagttgattaaattagtcgatttacctgaggattacttagatcgttatccgtctgaattgtcgggtggacaacaacaacgtattggtgtagttagagcgcttgcagcagaacaagacattattttgatggacgaaccgttcggtgcattagatcctataactagagatacgttacaagatttagttaaagatttacaaaaaaagttaggaaaaacgtttatttttgtaactcatgatatggatgaagcgattaagctagcagacaaaatttgtattatgtcgaaaggccagatcgttcaatatgatacaccggacaatgttttaagatatccagcaaatgattttgttagagaatttattggacaaaatagactgattcaagatcgaccaaacatgagaacggttgaagatgcaatgatcaaacccattacgattcaagctgacgattctcttaatgatgcagtcaatattatgagaaaccatcgtatagacactatttttgtagtgaataataaacatcgtcttttaggttttttagatattgaagatataaatcaaggattacgtcaaggtaaagaattaattgatacgatgcagcgtgatgtttataaagtacatatcgattcaaaactacaagattcagtacgaactattttaaagcgtaatgtacgtaatgtgcctgtagtagatgatcatcatacattaattggactgattacacgagcaaacttagtagatattgtgtatgactccatttggggtgaagagaatgaaacgagtcactcttctaaaacctattcaaatgaagttgagcgagagaatgaacgtcaaaatgaaacgcaacaacatttaacatcgcaaggtacacaacgttatcatgaagatattatgaacggaacagatagagaacatacccataatacggatgatacgggagtggatcgttaatgagagacttttttgcacaatacggagatgaactcgtatcgaaaacgatagaacatttctatatttctattatttcgttacttattgctattgtcgtagctgtaccacttggtattttattatcaaaaacaaaacgtacggcgaatgttgtattgactattgcaggtgtacttcaaacggtaccaacacttgccattttagcgcttatgattccaatttttggtgtaggtaagacaccagcaattgtagctttatttatctatgtattattacctatcttaaataatacagtattaggcgttcaaaatattgataagaacattattgaagcaggaacaagtatggggatgacaaaacttcaattaatgaaagacgtggaattaccacttgccttaccattgattatcagtggtatacgtcttgcaagtgtgtatgtcattagctgggctacacttgcgagttatattggtgcaggggggttaggtgatttagtatttaatggtttaacactctatgaaccaccaatgattattagtgctacaattttagtgacttgtttagcactaattgtggatttcttattatctttagtcgaaaaatgggctgtacctaaaggccttaaagtatctagatagtttaaaagggaggaatgaacaactatgaaaaatattaaatgtatatttatcgttcttgcattgtctctcgtagtattatctggatgcggcttacccggtttaggtgacagtaattcgaaagacagtgtgaaaattacagcgactgaaagtagtgaaaccaaaatagtagcaaatattgagaaattaatgattgaacattatacaaatggagatatcaaaccaatcattattggaaatttaggttcaagtattgttcaacataatgcacttatgcgtggagatgctaatatgtcagcggtgcgttttacaggaacagagttaaccagtgtacttgatgcacccccaactagagatgcgaataaagctatggatgagtcacagcgattatttaaaaagaaatataatcaaaaatattatcattcacttggctttgaaaacacgtatgcgtttatggtaacaaaagaaactgctgataaatatcacttagaaaaagtatcagacttagaaaaatataaagatcagttacgcttgggtatggatactcaatggatgaatcgtgccggagatggatacccagctttccaaaaagagtatggctttaagttcaaaagtgcacgtccaatgcaaattggtttagtgtatgatgcccttaaaaacaaaaaattagatattgccgttggttactccacagacggacgtattgcggcatataatttgaaaattttaaaagatgaccgtaactttttccctccatatgatggcagtccgttagccacagaaaagttaattaaagaccatccagagattgataaagctttaacaaaattagaaaatacaataagtacaaaagaaatgcaaaaactgaattatgaagcagatggaaaaggaaaagaaccagccgtcattgcagaagaatttattaaaaaacataactattttgaagataagaaaggtggtcaataacagtgaaagggaatgtattaagttcgctttatgaatattacactttgaattttggctatctgatggaactcttttttaaacatttattaatgtctatatatggagtattgtttgcatgtattattggcattccaattggtattttaattgcacgttattcaaaaatagcatggccagtgattactattgctaatattattcaaaccgtgccagccattgcaatgcttgctatactgatgttggcgttagggctcggtccatcaacggttgtatttgcagtatttttatactccttgctaccgattattaaaaacacctacacaggtatgacagaggttgactacaatattaaagacgcaggtaaaggtatgggaatgactaataaccaagttatgcgtatgattgagcttccactatcgttatctgtgatcatcggtggtattcgtattgcacttgttgtagcaataggaattgttgctattggttcatttattggcgcaccgacgttaggagacattattattcgtggaaccaattctactgatggtacagtctttattcttgcaggtgcgattccaattgcattaattgcgattttaattgatattggtctacgtttattagagaaaaaattagatcccacacatcgttctagtaaacaagtacaaagtttaagataaattaaaagcgttgcttagacgatgactaagttgttacttagttcgtcagcaacgctttttttattagaataatagtgaagcaagtggtggtacgattacaacaataatcacacctacaattactactgcaatacttcccattgattcttctgtttctcctagttctttagcagcggcaacaccaagtgtgtgtccacttgtaccaagagctaaaccacgtgcaattggatttgaaattttaaacatttttacaatttttccacctaatgctgaaataacgacagcgttaaggataactgctaatgatgttaattcttttacaccaccgataccgtcagatactggtagggcaatcgcagttgttgcagcttgaggtaacatagacgcactaatttgatcacctaagtggaataatgttgcaactaaatagattaagattaaagctactagtgtaccaacagcaataccaccaaaaatttgtaaccaatactttctaagtacttgacgttttttataaagtggaatcgcgaaactaattgttgcagcttctaagaagaagttgataatatctccaccaattttatagttatcataactaatacctgttacttttaaaaagacaattcctgccaccatcgctacaaataaaggtgccagtaggaaaaagccatttgtttttttatagaaatattgtgcaataatatatggaattaatgagactaaaataccaaaataaggtgttgtaatacctaagtgatcaaccattagttttcctccttaagttgtgttttttcattttgttcttcagtagggaataatgtttttgttacaaataattgtgatacatagcccacactgactaataataataatgttgaaataataattaatagaataattaaaattggatgttgacttaaaagtggtaacgaattaataactgatacaccggctggtacgaataagaagccgatattatttgttagagcggtccccacaccctctacttgacgtaattttacgactcctgcacttaataaaataaataataatacgagtccgattaccgatgcaggcattggaaacggaataaatgattcaataatttttgaaacaaataatacagcaacaatagttaatacttggataaagaaattgtaagttttacctgctttcttatctccctgagtattagcggtagttgaattgtttttcgccatattgatactctccctctttttcttttctcttgatggtagtataaaatgaaaacgctttcttgagttggatttagaagtgagttacgaaaattaataggtgagttgcagtatttcccagttgaaaatcagaaagtgtttatagaacaacaaataagctatgaggtcattaaaaaagcttttaatctaacacttgatcatatgaagcgttaggttaaaagctaacttagaatagatattaaacaagaccaatttcttgtttgaatgatttcataaatgaacgactaacttgaaatttgacattcgttgtcattgtcacttgatacgtataattaaaccagtgttcgacactttcgatatactgcttattaataatcgtagctctatgaatttttataaacaattgcttaggtaatttcttctcataataattgagtggttctgtcgtttcatatgttttttttaaagtcgtaatagtagaaattccgttgttcacagaaatcgcaacaatatcgtctaaattaatgacataaatacgttcatccacttcgataggaagtacactttgattattataagaagaagtactcgtttgtgattgtggagagtgaataggatcagaaaatgtttgaatctgacgtttagcgtttaataatcgttttactttttgaactgcttgttcaatccgttctaattcaaaaggttttaaaatataatccactgcatctaattcaaatgcctttactgcaaacgtatcatgtgccgtagcaaaaatgatataaggggggtgtttcatttttcgaattttatgagctaactcaatcccattctcatccattaaattaatatctaaaaatactaaatcataggtatgacagagtagtttttctaaagtttcttcaatattttcagcttcatcgatgatttcgaaactagatatttcatttaataagtaatgtaattcattacgtgctaatggctcatcgtcaacaataagtgtcctcatttaacgttcctcctttattaaatggtatggaatcatacaggatactgttgttccatgattagatgtatcaaagtgtaacgttgcactagaaccatataaaccagtgaggcggcgatttaagttttctaatgcactgccagttccagtgtctgaagccacactgatttgtccaagtgagggtaatttttcaggcgctataccatgtccattatcactaactgatatttttaatgaggcttttttgtattgaacgtctacacaaacaatgttatcttttcgtcgatgtttgaatgcgtgtttaattgcattttccaccaaaatttgaatgataaatggtggaattaacacttgtttataggcatcatcaatatgatatttaattgtaaatcgatctggaaaacgtgcttgttctaatgataaatatgctttgacttgttgtaattctttttctaaagtaatcgtactattacgcgcaccttgtaagtttgatctgaaaaattggctcaattgcaaaagtaacttgcgtgctttttcactgtcaatacgtacgagtgctgaaatggtattaatcgcattaaagaaaaagtgtggattaacttgagcttgtagagacttaatttcagcatctcgtaacaatttactttgcgtttcggcaagtcccaattctaattgacttgaaaaaatatctgctaaacctcgagcaagttgtttagttgatgttgtaatatgattatagtctgtaaaataaaattttaaagtacctgcgacgtttccatccgtcattaagggcacaacgatagcttctcgaagtggacaattcggattattacatccaatgtcctctttggaattggcttcttttaattggcctgtgcgtatgacttctttagataaattagtaatgatttcttttttagcgacatgatgatcgctacccgcacctacgtgtgttaaaatatcggttttattagtaattgccacagcagatactttcattagcctcagtataatttcagctacaggacgagcagatttttcatttaatcctgaacgaaaataaggtagtgttttgtttgctaattcaaggacgtcatgagtttgaattgcacgtgtttgttcttcttgttttaaagtagacagaataatagataaaaataacgcagttccaatactattaattaatatcatcggtaaagcaataaattttaccaatgaccaagcattagaaacatcatcagcaaaaactaaaatacaagccatctgaatactttcgtttattaatccaattattgcacctattaaaacagttggatagcgattatgtctcatggtgcgatatccataaaatccagaaattaatgcaatgatgactgatgaaaataggtaagtataagcatttgctccaccaatgatgattcgtgataagcccgaaataataccaacgataatcgccacaaaaggaccaccaattaaaccagacattccaatcgttaatactcgtgtattcgcaagtgacgtttcgttatttagatgatagtaaatattactagaaataattttgccatgctcaatttcaatcccagtaaagttagaaataattgcgaataatgaaaataaaatggtgagttctatttgagcacgtaatttttcacgtgcactcataatcgtcttgaagtgattaatattcattaaaatgtaagcaataataataattaagcccacacgttcaagtaataaaataaataaattaaacatttttgcacctattaagtatattaataaaattcaaaagttttactacactttttattatagtatggaaaatttaaagttgatagtttaaaatgtttacttataaatacttagcacttaatttatattaaatgataatttattttggaaaacaatatttaaaaagaaaaaaagatttttatatcccatttataataagctatgataaaattttaatgtagtttaaaattatatagtttttgggcaaagtaggaggaatttttttataatggagtcttcaaaagaatttaagggagataatcggttactcgttggaattattattagtgtattaacattttggctgtttgcgcaatcattacttaatattgtgcccacactacaatcatcatttaatactgatttgggtaccattaatattgcagtgagcttatctgccttattttctggtttgtttattgtaggtgctggagatgttgctgataaatttggtcgcgtcaaaatgacttatttgggactaggcttaaatatcattggttcattattattgattattacaccagttccatggttattactgattggacgtgctttgcaaggtttatcaggtgcattcattatgccatcaactcttgcgataattaatgaatattacataggaaaagaaagacaacgtgcattaagtttttggtctattggttcatggggcggaagtggaatatgttcattgttcggtggattgatcgcttcaacaataggatggcaatggatttttattatttctattgctttgtcgatactttcatttttcttaattaaacacacgccagaaacaaaaaatgaaccagatactgatacaaacaataacggttcaaaatttgatgttataggtttgattttattagttattacattattaagtgtcaatgtgatggtaacacaagcatctgatcgtggattattatcacctgtcattctatcattatttggaatatttttaattgctggtatattctttgtccttcgtgaatttaaaactgagaacccacttgttgattttagtttatttaagaataaaggatatagtggtgctacactttcaaacttcatgttaaatggagtagcaggtggtacgctcatcgtagtaaatacatactaccaaagtcatttaggtttcacttcattacaagcaggattaatctctatcacttatttagtagcagttcttgtaatgattcgtgtaggtgaaaaactattacaaaaattaggtgctaaaaagccattgctcataggtagtggatttacatttttagggttactacttttatcactaaccttcttacctaatttgttttatattatttcaagtattattggttacctactatttggtattgggctcggtatgtatgcaacaccatctacagatacagcagttgatcaagcgccagatgataaagtgggggttgcctctggattgtataaaatggcttcatcattaggaaatgcatttggtgtagctttatcaagtacgatttatggtgtttgtgcagcgaaaatgaatttagaacttggtggtttggcgggcgtactctttaatgccatcatcgttttaactgctttctttgtcattttcttcttaattccaagtaaaactaaacgtgcttaattaaaactggatattcatactatttaaatctgaggtgcgctagagtgcctcagatttttttattgataaaagaataaatgtaaacataataatgagtccttatacagagtgataatgacttctacgtcaattattgaaaaataaaaatagttctaattttatcgaattattcagaatattttgtttatattattgacgatactttattaaagtagtattttaaaaataatattaaaagaaggagtcgaatgttatgaaaatagcaattgctggttcaggagcgttgggaagtggtttcggtgcaatgttatatcgccaaggtaatgatgttacactcattgatggttgggagccacaagcaacagctgtaaaacatgaaggtttacatattgatataaatggagaagactatcatttaaacatccctatgtatcaagatacagaaataccaagtgatcttcaatttgatattgtatttttatttacaaaagctatgcaacttgaaagcatgttaacacatatccagccacatattcatgatacaacaattatggtgtgtacaatgaatggtttaaaacatgaagaccgtattgtaaattatgtagataaatcacgtattgttcgtggtgtaactacatggacggccggattagaatcacctggacatactcatttaatgggtagtggtccagtagagataggttctcttgtgccagagggacagaataatgttgaagtgatatataatctattagaacaagcaaaacttaatccacataaaagtgaagacttgcaacaatctatttggaagaagatttgtgtaaatggtacagcaaatgcgttatgtaccattttagaatgtcgtttatcaacattaaatgaaagtgaatacgcaagaaaacttgtatatgacattactaaagagatagtagaagttgctactgttgatgatgtacatttaaatgcagatgaagtctatcattatcttatcgatttaaatgataaagtaggtccacatttcccatcaatgtatcaagatttgattaataataatcgacgtactgaaattgattacattaacggagcagtggctcgcttaggttcagaacatcatatcgatgcgccaattaatcaatttgtagcgaacatggtacatgccaaagaagagcaacgtcaagctaagtaaatagagtgcaaaagtgagttaaaagtgattaactcactttttaatttgtaatcattaagggtaaatataatatatagtgagataaggagttgtgaaattaatgaaacaatcaacgaaaagagttatcatgacgggcgttattggcggattattaagcggtgcagttaaaatgggatgggaagcactcatccctcctagaacaccacaacgtgaagaagaaccaccaccaatgacattactgcataaattgaatttacctgacaatgttaaacatgctacgtaccgttataacgagaacgatatacctataactgtcatgggcattcattatggcttttcaattgcaaatgctatcgtatatggattacttgctgaaaagtgcccaaaagtgacgacattaagaggcacattcttcggtattttgattcatattgcttttcatgaatatatactacctaaattaaatctaacaccacaagttaaagatttacctaaagaagaacgcatttcagaattattaggtcatattgtttggatgaatacgattgatttaatacgaaatagtcatcgataaataaaaaaggaagagcgtgagagtctcgctcttcctttttatataattaatcttatcaatggttagaagtgtctgaggatgtttctgaagtagtttgacgctttatttctatgcgttgtcttaatttttctccctcaattttaccgactttcgcataatgactatgagcaaaatgcatttgaataattaaaaacgttgcacttatagcccaatataaacttaacgctgatgctgaatgtaatgatgcataagtaataaataaaggggataagaccatcatgacataataagatcgacgttcatttttaggataatggattgagttgacaagaggttgtataaaatacatcacagctgcaatgatggtcatgatgatatcagtatgcattaaattaaaccataaaaaatgaggatgctgagtaataccaccacttgttggatatttaattgacgtatataatccgagaagaattggaatttgaattaaaattggaaatgtgccaattaaatttttaaaaggattgattccatactcattatattttttcattaataatttatttgctgcacgtcgttcttcaggcgattgagcttctttaattttttcttggattttattaatttctggttttacgacctctgttttgccacgaataacatgaatattttttacttgaatacacatgagtggcatcagtattaaacgcaatataaatacaatgacgataatagctaaaccatagttttcgttgaatgcatgtcctaagacatggagtaaatcatccatcggttttacaaatacagtataaaacaggccgtgttgtgcttctttatgagaatagtcacaacctgcaagcattattaaggacatcggtaataagaaccatttctttttcatatttaaactcctatacactggtctttaataatcttagtcttagtgatataagcttaacataataatgaagaaaagaagacatacatgtttgaacagcctatattgatcgtttagatagcgtgatcatttttaggataaaataactccatagacttgtcagtaataagacgaagctaaataatgttatttttgcttgtaatggtaaccatgacatcataaaacgccaatcagaatttgataataagagtattggaagtaagtgaagtatcgctaaaataagtgtgaaagttaacatcatcatacttattttgatgagtaatccaccagacatcgttttaaaataaatagacttaaatttaaaaattaagcgatagattattagaaaaacacttgctacagctatcagtaaaataatagtgatgatgataaatacgatattccactgattaataagatattgtaacgttttaatatgttgaccattactcatttgtgtattgagatgctgtgcaagttcggctacattttttgaatagctattagcaagaactacaatgccatagtcttttttgggatttaaaataatatatgaagaatagttttcaagtgtaccaggatgatatacaattgtttctgaatgattatcatcaataaaccaacctgctgcatagtgaacgtcttgagaattatctattgctttaactttaggctgatgcgttagttgaactaatgatgctactttttttggcggattaagttgaaacttcaaccaagaggctaaatctttcgtgttcgtcatcatataagcagctggattatctcctaaattaaattcaggactatcagcataagcttttcctttttttattacatacccttgagcgtcattgttctttttcatattactttcttttactgttgattgcgtcatatgtaatggagtgaaaagatgtgtgcttaaataattcgcatatgattgatgagaagccttttgaacaatcaaacctaaaatatcataattcatgttggaatactcaaattgcttgcctggtttagcatctaagttacgtcctttgatactatgaacaaggccttctagactgtttgtgtcttttgtgatgttgtcatcatttgtgatgtctcctgaaataccacttgtttgagcaatcaattgatctactgtgatatctacttttttatgattatatttcatatagaaacctggaatatactgactgactttatcattgagattgattttatgtgcctcaacaagttgcatcattgcataaccagtaaatgctttggtatttgaagcaatttcaaaacgcgtatttggtgtgactttggatttctttttaatatttgaaaaaccatagcctttattaagaatcgtcttattattttttacaataagaacggacattcctggaatatgatcgtctttcattttattaacaatcatgttatcgatatcactttgtgacgatggactaaacattaaataactagattttaatttaatagctatggaaagaataatgattcctactaataaaatcatcccaatcatgatcaatttttttctcattttcccttacttccttacttaatacttcttaaaattaaacctctaaaaatagtatagcaagtttaaacttaaacagctctatacaaatattaaatactgttgatacctctttaaaactggtaaaaagaaaatacttcaaaaatataattataaaaagttacttaaaatgtaatttatactatattatttccgtggaaatgtatactttttcactaaatgggagtatattttatccattaaaaatgaatataaaaagaggtaaggatggattatgttcactcaatttaaaagacttattattggtaagcccaaaaaaaatagagacttaaaaaatgaaaaaataagtaactttaaggctttagcaattttatcttctgacgcattatcttcagtagcatatggtccagaacagattttaattactttatctgtggttggagctattgcatcttggtatacattgcccattgcggccgctgttttagtgctacttgcagcattgattctatcatatcgtcaaattatatatgcttatcctaaaggcggaggagcgtatatggtttctaaaacaaatttaggagaaaaatggggattgcttgcaggtggctctttattagtagactatattttaaccgtcgcagtaagtatttcatcaggtgcggatgcttttgtcgcagcgtttccaggattatatcaccataaagtattcattgcatgtttattagtactatttattctaataatgaatttacgtggtttaacagagtcagcaactgtgctctcttatccagtttatttatttatacttggattaatagtcatgattgttattggaacatggaaagtggcaacaggacaaactgaacctcatatgcatgcgacagtaggaaccgcagtgccaggtgtcacattatttttattacttaaagcattttcttcaggtgcatcatctctaacaggtgtagaagccatttcgaatgcagtaacaaactttaaagatcctggttctaaaaatgcagttaaaacgttaattactatgggaatgatattagctttcttacttgtaggtattgtgggattagcatattggtatggtattatgccacagactgaaacaactgtattatctcaacttgcaatgaatattttagggcataatgtaggatattattttgtacaagtaacgactgttatgattcttgtccttgctgctaatactggattcacagcttttccaatgttagctgcaagtatgtcaaaagataaatatatgccccgtatgtttaacgtaagaggagaccgtttaggttattcaaattcaattattacattaggcatttgtgcaatgttgcttattatttttttccacggtaaaactgaaaatcttattcctttatatgcagtaggtgtgtttattccatttacactagctcaatatggaatggttttaaaatgggttcgtggtcgtgaaaaaggatggtctactaaacttattgcaaatgctatagggggtactattacttttatcgtatttatgattttcttaattacgaaatttagccaagtatggccaatcttaatttttttaccgattgttgtatatatatttacgcgtattaatagacactacaaggatattgctgagcaacttagcacaactaaaattgttcaagatatgccagtagttgataaaaatctagcgattgtacccgttaatacgatcactacagcattaaataaatctatttattatgcacatatgattgcagatgatgtgattgctgtacatgtatctttcggagaccaaactgataatttatttattgaaaaatggaacaaacaatatccagatattagactagtgacgttacactcagaatatcgcagtgtcattcgtccgatttctcgatttatcgataaaattaataaaaaagcgaatgctcaaaactatgtcatcacagtggttgtcactgaatttattcctaaaaaaccatggcataactttttacacaatcaaacgagtttgcgattaaaaatgcatttattctatcaaaaaaatgttattttagcgacggttccttataaattacaaaagtagaagaaaataaaaagaactcgagagatacaggtctcttgagttctttctatatattaatgatttaattcattggcaagtacaatttcattatagttaatattttcacgtaattgcgtggcaatttcattggtaactttatttttagaaatcaattcgtctaaaatttgacgctgagtatacaatgcatctaatttagcatcatattgttgttgagtgtttaattcatgcataaatttattttcttcacgttgatgttttcgattatgatgttgtcttaacgtacgtgatagtgcgtaatattggttgataattaaactgatttcgaggacatttgtgctattttgttcttcttgaagtctcaaagtcacctgacggttaacaatacgtataatgtgttgtacttttttaaagttatttcttaattcttttctgtcagtatagcgctgttgttcaaatgaggattgattcacactatgatgtgaatcttttcgcgctttaaatctaagtatgattaacttactaaaacgatttaatttctcaataaaagacatttctctaaatgattgtgtaaattccattactttgcgataatcacttaaatcttttttagtaatacgctcctgtttaattaattgttgaagcgtctcagtttcaacttcttctgcaatgtctcttaatcgatgtaattcttttgtatttttatcatcgctttccatgtcgattaaaaatgataattcattaaaatattgattcagaataggtcgataatcgatatctttgtgcgtagctgctttttcttttaatgtgcgaataacatgttgaatcatgaaaattttagcggattgataactcatacctttgaagtgtgagtgttgtttggatggcgtaatgaacggaagaatcatttgtgcaaaaattaaactgatgagtaccatcattgaagcaataaatagtaaatcgtttctatgatcaaagttctgattgccgttaataatgaatggtaatgttaatgccattgacaatgaaatcgttccatgaatgccacacaaagtcataataaatgcataacgactccgttttggtggttgtgtttcttcttcgtcatcgagatatgcttcaacatttttcggatagtaaaaatctttgaacaaaacatagacccaaataaatctaaagatatagatggcaaatgctataaggaatgctatcacaattagaaagactaaattttgtggttcattacgtacaatttctaaaataacttctggcacaatatatcctaaaacgacgaagacaaagccatttaatgcataacttaatgtattccaaatttgattatagttcatttgtaattcagtttgggcgcgaatgagacgatctcgttctaaaccatgaatcaacccagctaccacaactgcaataatcccagaagcatgaacttcttcagcaataaaataaatgacaaaaggagtaagtaattggatgaaagtcaatgtattactatcttttaaacctttattagaagtgaggtaaacacgtaaactgacgactaaagcgccaattattgcgcctactaaaataccaagaaatgttgagagtagaaattgaccaattgcatttatagctgaaaaactacctgtcaccagagcagtcactgcaattttaaaaaaaataatacctgcagcatcatttaatagagactctccttctaaaattgccatagaccctttgggtaatactttacctttagtaatggctgatacagcaactgcatctgtcggacataaaatagctgcaatagcaaaagcagctggcatcggtaagttaggccaaatccaatgaatgaaaaagccgactccaatcacagttgtaaatactaatcccatggccataagaacgacaggttttcgatattctagaagtttttctctagaaacatgtgtcccttccacaaataagagtggggcaatgacagccatcataaagacttctggttcaaatttaaaatgtagtggaatgggtaagatgaataaagcgacacctaaggctatttgaatgaaagctgttggaatgttggggaagcgatgataaataatagaactaatgataacagcaagtataaataataaaaaagcttctaacaatcccatatgtattgtgactcctttttttaaataattaatattttatcatgattaaaaagataatgagatattttagtatatttcattattaagacatagaaaagcggaactgaattcagttccgcttaaataaaatatctaatgattgattgattctcgaggttgctgacgtgttttttcagctaaatattcagcattttttttatactttttatagaacaagaataagaatataaaccaaactggtgaaatacatatggctactctcgtatcagcactaaagaataataatacaaatacaaataagaaaaatgcaagaataacataagccattgctttaccgcctagaagtttaaatttattatgtttatgttcttcaggatttttccgtacatatataatgtaagaaataatgatcattgcccaaacgactataaataatacagttgagagtgtagtgacataaataaataattgaattgcatctgggaagataaagtttaataatgcagctaaaagtaatgttccagaagataccagcattgataagtaaggcacactatgatgatttgtcttacttaacattttaggtcctaatccttgtttagataaaccaaataaaatacgactattagaataaataccactattcgttgcagaagcggctgctgttaatacgacaaagttaacaagtcctgctgcaaaaggtaagccaatcatactaaataacatcacaaatggacttgcatcagggttgatcttattccaaggaatcactgacatgatcacaagtaagcctcccacatagaataataaaattctaacaggtacattattaattgcttttggaataactgtgcgaggatctttagtttctccggctgtaacacctattagttcaataccaataaatgagtagacagcaatttggaatgacattaaaaatccagctggtccatttggaaaaataccgccatgatttacaagattactaaaagacgcatgaccatacgatgttttaaatgaaaagaaaatcataactaagccaacgataatcatagcaataatagtaataatttttataatagagaaccaaaattctaactctccaaataattttgcaccaagcatattgaatgaaataagtaagagtacgataaataatacagttagccagtgaggaacgtttggaaaccaaaaactaaaatattgtcccattgctgttaaatcagacatacttgaaacaatccaagataaccaatatgtccaaccaatgacaaaaccaccgaacggccctaaatattcgttggcaatgtctacaaatgaattgaaacgtgtattactaagtaacaattctccaagtgctctcataaaagcaaataacacgataccaataattagataggtgatgagtagtgatggtcctgttaacgaaatcgtttgtccagaacctaaaaataatcctgtgccaatagcgccaccaattgcaattaattgaatgtgtctattacttaattctctttctaactgtcttgccatagacttccccctaagaaagcaatatgataatcgagtaagcgctttcttcgaattttgaaaacttttttaacaaagtagaaaagagtaaagatcaatttgtaattaattagaatattcagatttttaaaagtttaccttttttaaattttgttaaatatgtaactttgttaaaagttaattttattatactcttaattttcaaaaaaacaaatatgtgtataaaactatgaaaaacagaataatttatatttataataatctatggcataatagataaaatttaaaaatgtattagaggagtagaggaatgagaatcggagcgatttctgatctacatatagatagacatcctaaattaaaatcaaatgtatatctagaaacattgattaaagtagtacaacatagagaggttgacttactattaattgcaggagatatttcgaactattttagagatagctatcaatttattaaagatttaaaaactgctttacatattcccgtactatttgttccaggaaatcatgattattggaaagtagaggatgaaacgacatctcaagatatttatgatttttatagaacaaagccagagtgtttgttggatcatccatatgtaattaatgataattgggctattgtaggccatactgcttggtatgattacagttacgctgataaaaagtttgaagaaactcgattaaaaaaagggaaatattatggggccacttggcaagataaagtgaaaatcgattgggatgaagatgatacgattttatccaaaaaggcggctaagcatgttaaacaagcattggagcaacttcaagataaacaaattattttaatgacacatattgtaacacattctaaatttgtagtacctacccctcatcgtatttttgattttttcaatgcatttataggtacatcagatttcgatcaattatatcagcagtttccgattaaatacagtattatgggacatgttcattttcgtaaatctttagttgaaaataatataacctttttatgtccttgtttaggttataaaagagaatggcgaacagcagatatatattcagaaatgaatcatgcattaatggactttgtaatagaataaaaaaagagcaagaaacgacgtttagaaggaagtcgcttcttgctcttttaatttatggttttacatagatacattttttaccaggggcgttaaagctacgctccatgaattcttttttaatttttataatctggaagcgattaggtactaatgcaggcacaattacttttcttaaaaagtgactccataaaggatcaatataatagtaatgtgtgtcgtcatatccaataagtaatgtaacgtgaatgttagacacaagctgacgcgtatagttatcaaatttaaacgttttacgtgaaggtttttgacctaaacttgtatgatacataagaaccggttgtccttgatcaatcacagtttctagttcctctaaattcgtaccagtgccatctacgatacgtgaatcaaaagtttgtaaatatggaacataagcagaagggaaaatcgtttggtgatgaccaaacttaacaagtaaatgatgaccaacatagcctttatagggattatttggatgagtgggccaatgtttcataatatcagtagctttaatattatgatgattatattgtaataacatagctgcagaaacgccttcacaacccataatcatagggattggaaaaagttgacttttaggcgtaacagataataattttttattcattaacgttctcctttatgacaataaaacattgttttaaagtaaatttattatataccttgattagagtagcgtataatcatttgaattctttgtattaacaaaatgtgtgtcaacatatttaagacaataagaagaatgttgatatagtaattgatgttaaaaattcaaacccaaaagtgattaaagacatcatgcttagaatgtatcttattcatatactaatttttaatatgcaacagaaagattgcacagttaatataaaataaaattgggagttatgcatttaaaaatgaatatatgcaaactcccaagtattattttattttgcagcatgaacaatatcattcatgttatgtttattgcgtcaaaaaactttattgcacattataccgatagataacattaaaggaccctgctttcttttgattctgtagatatgggtttagtctttaaggtgtcatagctttttatttaatctgattgtgttaaaaaagtaagtcaatcttatttttctaggatgcatgttatcgttaatacaaattaaaatttattaaataatacgtgattttcaagatgtacatgttcatgtgtttcacgttctaaatgctcaaggcgtgtgtagactaagcgccaagtattacatgcttcactaggtggctgatactgatttgttaaagcactcatttcttctaatagatgcccaatttgagtatgatcttcaactaaactttcaataacttgatgcgcattcttaacttgttcaccacgtgcaattttaatgagtaatggaaaatcatgattatcttctttatccatatgttcaagcataccatcacgatactggcgatataactcttgtaattgaagtaaatgcggatggtgtggtccatgaacttttgcaattttagtgacataaggtgaaaggtttttaaattcctcacgcattgtttcatggtaacgtgattgaatatattgaattaaggaaggggcatctaaatatttaacgttgatatttcctgttgagtgtacaggtaaatgattaatttcttctataattgtatcgacatttacttttttattttttactgcatttttaattgagatatttccaccacaacaaaaatctattccgtattttctgaaaacatccgaacttaatggaaaatcagtaacgacattagcaacaattgaatctttagtgaccataaataaatcctccttatttaattatagtttattatagtaaataataatcactttcaattagagaagaataagttgtcatgtatttgttgaaaagtcattacaaatttgtgaatgttaaaaatacttgagatataataattgtctcaaatattttttaacatattagcaatcgatatttatattaaaaatggatgctagattacgtttattaatataagaatacattagatacgttgatattttttaaaatataaaaattgaagtaaaactatgagaattgctgtgataacaattactgtgatataaggcattacattgtattgtcctttaagaccaactaaaggagacactaaaccaccaaggataaattgaaacaaacctagtaaactagaagcatttccacttccaccagtacgttcttccatagccattgaaaatcctaaggggccgattgaagtgacaggacaaacatttaaaaagaaagcgactaataaaagccacaatggaccttgtaatatcaaagtaaatacaatgagaagtacaccaataagttgaatgaaagtcaaataaattaagattttaaagcgatgtatacgttcaacaagcaaagcaacgatttgactcacaacaattaaaccaatgccattgattgcaatcattacgctaaattgttgaggtgtcatatggtatattttctgagtgataaacggagaagcagatgaaaaactaaataacataacataagttaatccttgcaaaaacattggaataataaattttggtcgtttaagtaaacgtccaaagtcagaaaatatatgtttaaaattggaagtaacgtgctcagagtgatgtgtggtcggcatattgaaagtaacgccacctaacataatcatactaatagctgttaaaataacaaagataattctccatgagccaagagaaagcgataaacctccaagtaacggcattaaaatagtcactataccatttacaaccataagagaagcaagaaatttagctagagtatttccttggtaataatctcctgcgaaagctttagcgataacaataatacctccggcagttaatccttgtaccaaacgtatcaataaaaatattggaaatgttgtaataaatatcgcactacatgaagctaaaacgaatacactaagaattattagtgcaattctttttcgacccaatacatctgataaaggtccgaatacaaactgtccaagcgctagaccaatcattgcaaaggatagggtaagttgtatgcttgacgttgatgtattaaattgttgctgaattgctggtaaagcaggtaaatacatatctataatcattggaccaaatgctgtcattgttcctagaacgataagtaatagcatcggcaatttagtatgtgttgagttatgcataattgtactccttgaaaagatttgcaatgtacattatataggtttttgagaaaatatgtaatttcaaatataaaaagctctaaaaagattgatttaatcaatttttttagagctgaaatttatcacaatacataagaatattaattattattaccaagaatactgtttagttttttcttgatatcatctactttattattgacatcatctaatagcgcattcactttgttttcatttgcgttgttttgttgtgcattatttgcttcttttaatttattaacttggtcttgataaaattgagttaatttagagtcttctttagtaatttcattattttttaatttatcaatttgagattgaatttgtctaagacgtgattcagtgtctattttatctttaatatcattttttgcatcttcaacttgtttcttaatattatcgctttgattttgaacttcttgttgataatttttagatacatcatttgttgcattataagtatgttgtttattttccgattcatttttataatcaatataagatttagtcgcaaaaatgccaataattaaaagaagaattgcaataatagcgattaaccaacgttttgattttttatttttttcattctcttcttcaagtaattgttcacgtctaaagtcacgatcgttatagtaacgattagcattttcatcataatcgccttgattttgatgatactcatgacgcggttcatttcttctgtaattttctttattttgacgtctctgttgacgttgttgatgctcgcgacttttttgattacgttgttgatattgatcatcgtattgatatgagtctttgtatttttcagtacgtttcatagatttcacctctttttaatcatttaacttaattaatcgagcaatattttcagcagtttgtgttaagaatcgttctccatgtgctaataaatagggtagttctgagggcgtttctataatgctaaacacactatcaattccatgttgatatacggcttgataattttttcccaaactaccgcatatcgcaatcacaggtaagtcgaattgtttggatgcttttgccactccaataggtgttttaccataaattgtttgtacatctatttttccttctcctgtaataactaaatcggcatctttaattctttcaagaaactgcgtttcttttaagacaatatcgataccattagataatgacgcattgaagaaagtgagaataccggcgcctaatccaccggcagctccagcaccgggtatatctttaacactgatatgatatgctttctctatcatatcatgataatttgcgagtgcggaatccaactttggtatcatcttttcagttgctcctttttgtggtccataaatatatgtggcaccattagggcctaataaaggatttgtaacatcacatgccacttcaaaggtaacgtcgtttaatctataatctaaatttgacgcatctatatgggtcaaatgagcaagagcaccaccaccaagttcaatttcttcattatcagagtttagaaactttacgccaagagcggtcagcataccactaccaccatcatttgttgcacttcctcctatgcctaatataattttagtcacatgatggtttagagcgtctttaattaattcgccaacaccaaatgttgtagtaattaaaggattacgttcatctgtacgaattaaatctaatcctgaagctgctgccatttcaataatagctacacgattatctctagaacgagcataagatgcagtcacttctctaaatagtggatcatgtactttaatgctatgaattgacgcatctaatgcttctattaaagcctcggttgtaccttcgccaccatctgccatagggataacctctgttttaagcgaatcaccgaatatatttttaaaaccccgttctatagctaatccagcttgtttagcagtcatactctctttaaatgaatctggcgcaataacaattttttttatgttcaacgagatcacttccgattaaaattataaataaaaatctaaattaaaatgatttaatgtttaaaatataaaaaaagtatataatggtatttaattaaatagaatcgattaaacactataatttaacattattgtagtggaggagtagtgtaaatgtctaactttaaacaacacgaattttacatctgggtcatagggttattattattttacggttacttaggtttaatcattcctttacatggaatcgattggttttttggaagtcctcaaggcataagtgccttttaccaacattttgataatttgaatggacgttatattagtaatttaattgagcttgtagcagtacgttcggtaatattacgtatgattatgtattcaataatatcagtaagtattattttattaatactcaaattgatacgccaaacattttcaattcgtcatctcatgcttgcaactattttattacttattatacctaattcagttttttcagagagttatggaagctttggttatttttttagttatgcttttggaatgatatgtgttctctatcatttttgttttataagtaaaattttatttacaaaagatgaactaaaaatgtacaatatcattttgttttggataagttgtttcagtgggcaattatttgctgaatcattaactttttttgttaatttagctttattcacgacattaatggcttattttatgttaaaacgtaaaattaattttaatttattaatagggtttctattatcattatgtggtacattaataatgttgattaaccagacgtacattaattatctgagtgacattcaagcaatgagagcacacattgatggcttaggttatgttcataaattaagagttacaatattaaatgaccttccacattatatgttttttaatcatattgtcatagtgtctataattgcgattgttataattgggttacttataaaaaatactcgctttcaaacgttttctaaaattagacaaattctattaatgattggcatacttgcattgcctatatacaagatatttatttttgaaccctttaattttaatcaaacaacgttgattacaagttatggtctaattaatttcttactatgctttagctttttcgtcagtataagtatggctagttttattatagttacagatagctactatcgtatcattttaatcgctgcttttatttctattattttaagtgcgatacctatctttttcatttcagaggtaacgtctcaacagttctttattgtatatataatgtggtgtgtgatattgattactttagttactgaattacatactttaaaacaaagctatgataatattcttaaaatttgtgtaggatgtttattattcgtatttattgctatttttacgattgtgcattttaaatatgaaactagattaaataatattcaaactcaaattcaacaacatagaaatgaaattattgtaaaacatttgccatttgagacatatttctatgaaatgactccaactgaagaaaccgcaaaggaaaatttcaaagagtactatcaaatttcaaataataaacaacttaaaatactgccgtttgatattaatgtaatagaagacagaggagattaactatgaagttaaaacaaacgcactatgaaataatcaaattcgtcatcgtgggtgggattaatacacttgattattatttagtgtatctcattttattaaaattattacacgttcactatatggtgagtcatattattggatttatagtaagttttattatttcttattatttaaattgttatttcgtttatagagttaaaccaacccttaagaaatttttaagttttccattaacacaagtagtaaatatgggaatgcaatctttgtttttatatatatttgtaagatggtttcatttcccttctgaaattgcaccctttgtaggacttatcgttacaattccaattacttttatattatctaaatggattttaaaagactaaaatttaagaaagagctagaaatatgtatttctagctctttttttataaatagtaaattaggcttgactaaaaaattaattagtttatttttataaaaataatagaaataaaaaaatattgtaattcaaatttcgatagtacatactattaatactaagtgtttaaggtggttaactagatatgacccaaagcgaaaatcttaaattggcgcaaagaggcgcttatttaagtttagttgtttatatcgttttatctgttgcaaaatatattactgggtatgtgtacgattcagcagctgtaagagcagatgcattgaacaacatgactgatattgttgtctctatcgctgttattgtgggattaaagatttcaattaagccagctgataaaaatcacccttatggtcatttgaaatctgaaaatatttcaacgcttctcgtatcatttattattatgtttgtaggtatacaagtagtgattgaaaatgcacctcgaattttgacaaatgaacaacatattccaaattttattacgattattattagtatgatgagtggtgtcattatgattggtgtttatgctattaatcataggcttgcaaaacaaactaaaagtagctcattagactcggcctcaaaagataatttatctgacggtttagtcagtattggtactgctattggattattatttacacaatttggtctacctatcattgatgtaatacttgccactgtattagggtgtttaattatttatactgggtttggaatatttaaagattcaatttttacattgagtgatggatttaaagaacaagatttagaagaatatcgaaatcttgttcaagaagttacagatgtaagagaagtaaagaatgtaaaaggacgttatcacggcagtagcatttttttagatgtaacgattgtagttgatgcaagtttatcattacaagaagcgcatgatatttgcgatagagtagaaacacatttagaaaataatggtatatcgtctgtatatgttcatccagaaccaaatacattaaatgaaaaataaaaaagagcgggagtatactcctgctctttttttattcaatttaccaccaaccatttgattctctaaaacgtatcgctgctccaattgatccataacgttcttttgcatattgaatcatgcctttcatttgggtttccactgatccatacccccatgattggttagtttggcctaatccatggtattgaccatttgatgcattagggttaccgccggattcaggaagtacaattttctcccacatttcttctgtgcctccagcagctaagaaacgttgatatactgattgtgtacgacttgaagtactagaagtggtcgtgtttgaacttgatatatttaaattagatgtatgactttgatgatattggtattgatgttgttgagaaggggatgttgataccttttctgcgtgtgcctgaccactttctactccagcggcacctaatgagagcattgtcattaatgcaaagattgatcttttcataataaaaaactcctttgtgatttggatattaatgttcgaattaaaacattgcatcccaataaatctagatgttgactacggtatgttcactataacagttcatttaatgacataggttactgtcatatcaagaataattatcaaatatgaacacgacgtaacacatatctcaacgttttatcatatattccgaattaaatgataagtagtcctattatgaaaaaaattgaaatcgttctataataatgttgtaaagaaaaatagatattaaattaaataatgaggaaagtatttataattcaatcatcatactcattaactttctattaatctaaggagtgttatattatgcccaaattaattttatgtcgacatggacaaagtgaatggaatgcgaaaaatttatttaccggttgggaagatgttcaactgtcagaacaagggagaaatgaagccatcacttcaggtaaaaaattaaaagaaaacaaaattgaaattgatgttgcctatacttctttattaacaagagcattagaaacaactcaatatttattagctgaatctgatcaagaatggattcctgttcataaaagttggcgtctgaacgaacgacactatggaaaattacaaggattaaataaagatgatgcccgtaaggaatttggtgaagaacaagttcatcaatggagacgttcttatgatgtattaccgccagcacaaactgaagaacaacgtcaatcttatttaaatgatcgtcgctatcgtcatttagatcatcgtatgatgccttactctgaaagtttaaaaacaacattagagcgtgtcattccaatttggactgatcatatttcacaacatttattagatggggatactgtacttgtagcagcacatggtaactctattcgagcattaattaaatatttagaagacgtatcagatgaagacattataggctatgaaattaaaacaggcgcaccgttaatttatgaattagatgacgatttaaaagtaactaatcattattatttataaaagtgtgagcaagaatttttatttattgtaatatagtagatagaataaaaggctaaagcattaaagaagtgctttagtcttttattaatgtagtggagtaagattgcttataaaaatagttaaacggttttaactaacgtcgatattgcttaatcatctttaatgcacgtttacgtgttttaatattagaactttttaagttgcgacgtgcagtttgtaaatctggtttcataaatattcctcctttttataaagaataaaggaaaagatggcttatgtaaatagtaattattacgatttaaaaataaaaataaggagatgataccatgtcgcatagtaaaaagttaattatgattttcactatgctattaggtggtttttttggtttattaaatgaaaccttgttgaccacagcattaccgagaataatgaaagattttcatattgaatattctcaagtacaatggctcacaacagccttcttactaacaaatggagtagttattccattatctgcatttattattcaacgttatacaacaagacaggtcttcttaactggaattattatattctttctaggcactttactaggaggatttagccctaatttcattactttattaattgcaagaattatccaagcattaggttctggtattatgatgccactaatgatgacgactatattagatatatttgaaccgcacgaacgtggaaaatatatggggatgtttggattagtgattggtttagcaccagcgattggacctacattatctggatatttggttgaatacattaattggagagcattgttttatgttgtagcgccaatttcagcagtgacctttatacttgctttaatttttattaaaaacgttggagtaaaagtaaaagcacccattgatatgctctccattattttatctattatcggatttggtggtatgttatacggggtaagttctatttctcagaaaggttggtatgacccagtcgttctgagcactattattttaggcattatttttgtagttttatttatttggagacaagaacgacttgaaacccctctattaagttttaaagtatttaaaaataatcaattcacagtaggtattgctattatggctgtaacgatgatttcgatgattggatctgaaacggtattacctatgtttgtacaaaatgtgttgcaacgtacgcctgttgattctggtttgatattgttacccggagcaattgtaatggcaatcatgtctatcatatctgggcgtttatacgaaacgtttggagcacgagtactttcaatgataggtatgcttattgtaacgattacgacgtcctactttgtagtaatggatgagcatacgtcaacaattgttttagcaactatttatgcgattcgtatgattggtattgctttaggattaatgcctgtaatgacacatacaatgaaccaactcactccagaattaaatgcccatggatcgtcaatgacaaatacaattcaacaagtagcgggttctattggtacagctggtttagtaacaattttaagtgtagcaagtcagcattttaaaccgacactcagtgattatcaaggaatggctaaaacagagatgatgaaacacattcaaacagacgcaatgatacatggttatcattctggctttttatttgcagtcattatcacagtcgttagtttattattaacttttttacttaaacgaaaaaaggatttaaatgaagaaaggcattaacctcatatctaaacattctattttatttaatagtttaaatagttattgactattcatagtgatgagattagaattaatttattctgactaatttaataggaatatggaggagttattaatgaaaagacttttatttgtagctttgacacttatttttgtattagccgcatgtggtaatagtggttcatctgacaaaaatagtgattcaaaatcaagtagcagtaatagtgataaaaaaacattacgtgtaggaactgaagggacttatgcaccttttactttccacaacaaaaaagatcagttaactggttatgatattgatgtaattaaagctgttgcgaaagaagaaggatataaacttaaatttaatgaaacatcttgggattcaatgtttgctggtttagatgcaaaacgttttgatgtcattgcaaaccaagtgggtatcaataaagaaagaaaagaaaaatataaattctctaacccttacacttattcaagtggtgtcttagttgttcgtgatgatgagaagaatattaaatcatttgatgatgtgaaaggtaaaaaattagcgcaaacatttacttctaactacggaaaacttgctaaagataaaggtgctaacatcactaaagtagatggtttcaaccagtctatcgatttattattatctaaacgtgtggatggtacttttaatgatagcttatcttatttagattataaaaaacaaaaacctaatgctaaaattaaagcaatcaaaggtgatgcagaacaaaataaatcagcatttgcattctctaaaagtgtcgatgataaagttgtttctgatttcaacgatggtctgaaaaaacttaaagagaacggtgaactagcaaaaattggtgagaaatggttcggtgaaaatgtttctgagcctaaatagtcaacaacaacacgcattagatgcagcaactcaagcatttggacccatgttggaaggtttagtaaaatactctattccaattacaattgtgacatttattttaggtttgattatcgctttgtttacggcgttaatgcgtatttcgtctagtaaagtattaagaggaattgcacgtgtatatgtatctattattcgtgggacaccaatgattgtacaactctttattatcttttatggtattccagaacttggacgtctaattactggaaatgcagacgaacaatggacattgtcttctgttgtttcagcgattattggattgtctttaaatgtgggtgcatatgcatctgaaattatccgtggtggtattatttctattccaaaaggccagacagaagcggcatactctattggaatgaattatcgtcaaacgattcaacgtattattttacctcaagcgattcgtgtttcagttccagctttaggtaacacattcttaggattaattaaagacacatcattactaggatttatcttagtagctgaaatgttccgtaaagcgcaagaagttgcttctacaacatacgagtactttacaatttatattctcgtagccgtgatgtattgggttgtttgttttattatttcagtcatccaaggcttctatgaatcatatattgaaagagggtataaggcatgattgagttatccaatattcataaatcttttaatgataaagaagtaattaaaggtattgatttgaatgtaaagaaaggtgaagttgtcacattaattggtcgttccggttcgggtaagactacattattgcgtatgattaatgcgttagagattccaactgaaggcaacgttactgtgaatgataaaacgtatactgctaaagataagaaatctcaaattgaagtacgtaaacaatcagggatggtattccaaagttataatctttttccacataaaacggctttagaaaatgtgatggaaggtttagtaactgtaaagaaaatgagtaaatcagaagctaaaaatagagcattagacttacttgaaaaagtaggtttgacacatgttaaagatcaacgtcctcatgcactctctggtggtcaacaacaacgtgtggcgattgcgagagctttagcgatgaatcctaaagtgatgttatttgatgaacctacatctgcacttgaccctgaacttgtaaatgatgtgttgaaagttattaaagaattagcaaatgaaggcatgacgatggtgatagttactcatgcaatgcgttttgcaaaagaagtatctaataaagttgtatttattcatgacggtgaaattggtgaagaaggttctcctgaagaattatttgatcaccctaaaactgatgaattaaaacgttttttaaatgtgattaatgaaaattaaaaaagaatcgtcgtttgagatatttcatcttgaacgacgattctttttattgaataatgctttctttcttcagataaatagattttagaaatatttatattttaaactgatagtaaaacagtaagctcaaattgaagtactttattctcatattgattaaatgtcataatttcaacggttaaactaccaaattgttttttcaattttttatctaaaactttaacttttacatataagttgtcatttggatagacaggtttaataaaggttacattatttaaatgagtccctgctataatgtcttcttcatatttgttttcttcaatccaaagtttaaaggaaagagaaagggtatgcatacctgatgctataatccctttatacattccttgacctgcttttttcttatctagatgcatatattgagggtcaaattgatgagcaaactctaatatttctttctcagttattttgtaatgtttactaatgaatgtatctcctatagaaaacatactgtatttcatagttatatgcctaccttaaagtatacttataatgcaatgattatcttctgtttttgatccattgttgagtatgataaagaacaggtttaattggtttaatgaagtcaccaatatattcataaacaccagcattaaagccttttttgaactgttggacaccataatcttcagcattttcactaaagtctccagtaataccatagaagttgtaacggtcaatgttatgctctttagcaaatttaatcatttcccactgtaaacgataggctcccatatattcattatattttgggttagaaccactagataaataatatacttcatgttcattgtagatatataatgcagctgctagatttaatacttcaccttctgctgcaattttatcttttgtttggtttattttacgttcattgctatcaaattgttgttgaagttgattacgtttatttttgttctttttagagttagggctttcttttaaagcttcttcaatttcagtaagttgttttgttaaatcctcatgtttatgttgtagagtagacaaataatcttttaaatcgatataagctaactttagcatggcatgatctttatatgttttttgcatttcatagaaataaggctcatctctaaatttaaagccatgtttttcttcagccatttggaacagttcgaagaaagtatgtgtgtcttccataggtaatgttttaacttttacgcccatttcatacgtctttttaatattacgacgtgtttgatagtccatttcttttaataattggtcttcagttttatctttaagatcaagtacagacaaccaacgaatttgactcattgtactataacctacagaccaaccttgatgtttatatcctaagtcttcaagcgttttaatcactgcacgattatcgtagctttttaaaatttctccatctgcattacgtaggttttctaaaatatatggatctactaaaacaaatagacaattttgtttttttaaatattctgttagtgatttgaaaaagaagtgaaccagtttgatattgctataatccattactggaccacgatgtgtgtaaaaatatttataaaatttcaatgcgcgtgcttcagtcattaatgttgctgcaatgacatctccactatcatctttaacacctacaacatgtacatcatgtttcatctcatttctattatcaaagtgtattcgagattgtgtatagtgagaaaaatgttcggatgtgaatttttcaaattcttcaggtgttaaacttacgaatttcatgattatctactcctctgtgtttttaagaattctaaactattttatcaaattagttctattattacacacatttagtaaattaatttgctcatgctttagtattagataataattattttttaaaatatataactataaaatttaaaatataatattttttaatagtctagtttatattgcaaaaccactgtatgataatcagtatatgcatagtataatagtaagagttatattaggttaaattagaaaaagtaggagtgaacatatttgaaaagattgattttatcattaactgtatgtgtcatattgctagcgggttgcggtaatgatgaatatgctaataaaatagataaagctgtaaaactacaagataaaaaacaagaacgacttgctaagaatgaacaaggcgatgtagtaaaacactttgataaaaaagacgctaatatatatgtgtatgaaaaaggtaagtatgttgtattagcatatagaccattaagcaacaacgatgaaatgcattattatacatatcaatttaaagataagaaggcaacctacttagagcactttgatacgaaacaatatattagtacacatgattcggattataaggaagaaaatcttaattaactgaaacaatcttaaggagtatatatgaaaaaattgatttttattggagctgcgatcatatgtttaatcattatcgttgtcgcttgctctcaaaagaaaaaagaaacaaccccagctcatacgagaaatgggaaaattttaattgtagaatatggagactataaatgtccttattgcaaaaaaattgaagataacgtcatgcctatcataaaaaaagattatattgatacaaataaagtggaatatcaatttattaatgcaagttttcttggaaaagattcattaatgggctctagagcagggaatgctattcaagctattgcacccaaagaatatcttacattccaaaaaaatatatatgctcatcaacaagatgaaaaaaaacattggattactgaaacattacttgacaaagaaattgatcaattagatatttctcaaaaacaaagagatcgcattaaaaaagagtataaaactaaaaacagcgatgcttggaaggaagcagaaaaacagaaaaagttaacaaaagaaaatcatattcaatccgttccaacagtttttatcaatggtaaaaaagtaaaagatccttataaaatcaaagaatggaaaaaatatttatagcataatacaaaagatctaacttaatgttgtttaaatattaaattaggtcttttaattatgtttttatatcgtttaagacatatttaaaaattttacattcaaaatcattatttttataaaaaaagggaatacaaataaaagaaacaaaatcagcacaattaatatattttaattaagtcgcttagtttgtaatttttgttagatttatttaatatactaagtataataattatatcaaagtaaaagataaataaattgaataatattattttatcatttcactattggagggaaaataaatggctaactttaatttagatccagttcattcaggtgtgaatttctcaatacaacaccttgtaattagtaatgtaaaaggacgttttaacgattttgatgcagatattacaggtgactttcatgatttaagttctttaaaaggaacttttactgttcaagctaattctattgatactaaagtagaagatcgtgataatcatcttaaaagtgaagatttcttaaacgttgaacaatatcctgaaattaaatttgaaattattagtgttgatgatcattcagttactggtaatgtaacaattaaagatcaaacacaaaaagaaacatttgatttagattataaaggtattagcttaaacccacttaataataagaatacagcaggtttagttattactggtgaacttgatcgtgaaaaatatggtgttacatttaaccaaccattagaaactggcggttttttattaggtaaaatattaaatgtggaattcgatttagaatttcctattgaagaataataaagttaaaaaacaggcaaggttctaactttgcctgtttttttattgtcttaaaatataatagttgctaaactataggaattatcatttttaaaatcaggagagataacgatgtcaattgaagtaaaagaaaataaaattatttttaaaagaacatttaaagctcctatcaatgatgtatttgatgcctatacaaatccatcgttatttgagcgatggtttcatcctcaaggcgctaagacaaaagtatatcgttttaatactgaagaaggcggggaatccttctttgctatagaaacctcagaacagacaagctatacattaactgaatatcgaaaagtggatcgtccgaagtatcttgaatactttgattactttgctacacctgagggagaaaaagatacgcgtttacctggtatgcatatttcaatcaattttaattcagataataaacaaatgactactattacgtctacgtcagtgtttccaactaaagaagcagctcaacaagcggtagatatggggatagaagcaggtatgaattcaacattagatcaactagaagtcttacttaatgaataaatcgtcatgagaatgtcaaatttaaattgaacttttaagttataataatgttgaaaagaggatgatatagtatgaaagaaagatatttaaaagtgctgggcttattttcaatcagtactttaattccaacattattaattaattcaaaatgtctaaataatggcgtcataaagtatattttaagaacggcattaggctatggtatttttgcttcaggattacgttatttttcaaaattaaaaaaagcacattaatatcatgacaagagcaagatatggaaaaaatctccgtattttgctcttttttaatctcctctattcaaaatgcacgttactatatataatataaaattataaatgaattaaggagagggaatatgacaagcaaccatacaacgattaaagatacatatgctacaaaagatattattaaagcggctgtaggacaggtacaaatgaaagaagttatggcaactcagacacctggacgatatttactaaagtcaatgatgtcaggatttttactagctattgttacagtatttatgttagcaatcaaaacacagtttgcaggaacaaatgatggccttgttaatttattaggagcgatttcatttagtttagctttagttctcattgttctaactaattcagaattactgactagtaattttatgtatttaactatcggatggtactacaaagttattacagttaaaaaagtgttatacatattcttattttgtttcattggaaatatgataggtggatttattttattcttattaatgaagggtacacatgtgatgacacctgaaatggttgcaagtctaagtaaaacagtacatttaaaaacggtagaatcaacttggttaaatattcttatcaaagggatattctgtaacttctttattaatattggtatttatgtttcaatgctttttaaagaaggtttagctcgcgcatttttcattgctgttggtgttatagtatttgtatttatgggatatgaacacgttgtatttaatgctggattatatgcaggaatgattttttataatagtgatgcattatcatggatagatgtgctaaaaaatatagtatttgcttttgtaggtaactatattggtggaggtatttttgtagggcttgtttatgcctatttaaacggaaaaagagacagtataaaagcatagtaagacgatcaaagagcggaaatatcgagagacatttccgctcttttaatcctcaacatattgacttaatattcagaaaatcttattattttaatcaacattaaaataataagggggaaaccatttggttgcgaatattctagtagctcatggcatgagaaaaggagatcaaaataaagcactcggtgaatttatagatagtttattacaagatgaaacttacgcttatgagcttgcttttattgaaagtgaagaaaaaagtgttgaaaatacgattattaatttaatagaaaaaggagaaacgcaatttaaagttgtacctttacttatattttcagctatgcattatattgtagacattccagagatgttaagaaacattaaacaagcacatccaaatataacctatgaaattagtgcacctcttggtacgcatccatatatggtagatttagtagaacaacgtattaatgatgtggatataaaagaagagtcagatgtggcagttgtattgattgcacatggtagcttttcttatactaaagcacatgatgaactaaaagaattgagtactaagtttaagcaagacaaacctatatattgtcgtacgttatatggagatattacgtttaaaaatgatttagatcaactttcaagacaatatcatcatcttattgtggttccaatgtttttatatgatggacgtttagttaataaagtaaaaggtcttatatcagagatggatattgctaatgaattgcacatgactccgtctattaatttcgaccctattttaaaatcgattattcgagagcgattaaaagaattaacagtatagtaactacatacatctttcattatatgagtgctaaattctcacttatgtaatggaaggtgttttttattagggaaatccccgattttacattttaatgtgaaaataatcacaattttaaaagaatatggtataaaatagccttgtaaagaatagtgagttcaaaaatatttgaagttaataataattaaatgtaataaaaggggtattgatatggctaaacaaaaactcgtaatgattggtaatggtatggctggtttaagaacaattgaagaaattttagaacgttcagattctcaatttgacattacaattattggtaaagaaccttatcctaattataatcgaatcatgttatccaacattttacaaaagaaaatgacagtcgaagaaacgattatgaacacttatgactggtataaagaacatcatattgaactaattgtagatgatccagttgaaaaagtagatagacaatccaaaactgtcactacatctaaaggtatcactgtagcttatgatatctgtatctttgcgactggttcaaaggcatttgttttacctatacctggatcagaattaccaagtgtcatcggttggcgcacaattgaagatactgagcgtatgattgaaattgctaaaacaaaacgacgtgccattgttattggtggaggtcttcttggattagaatgtgcaagaggattaatggatcaaggtatggatgtaacagttcttcacttagcagaatggctgatggaaatgcaattagaccgtaaagctggagatatgttaaaagctgatttagagcgtcaaggtatgcatatcgaactacaagcaaattctaaagaaattataggaacagatgatgtagaagctattaagctagctgatggtagagtaatagaaacagatttagtcgttatggctgttggtatacgtccatttaccgaagtagctcgtgaagcgggattagaagtgaatcgaggtatcgtcgttaatgattacttgcaaacatctgatgaacatatctatgccgtgggtgaatacgcagaacacaatggtaaagtatatggtttagttgcacctctttatgaacaaggtaaagtgcttgctgattatttaacaggtaaagagactgaaggatataaaggatctacgacatttacgtctttaaaagtatcaggttgtgatttatatagtgcaggacaaatcgttgaagatgaaactgtacacggtatcgaaatctttaacagtgtagataatatttacaaaaaagtctatctaagtgatggtcgagtggtaggtgccgttttatatggcgatacagatgatggttcaagattttatagtatgatgaaaaaacatgaatcactagaggactatacactagtgtcacttcttcataaaggcggagaagaaagtggaacttcaatagcagatatgcctgatgatgaaacaatttgtggttgtaatggtgtagataaaggtacgattgtcaacgcaattacaacaaaaggattaactactgtagatgaggttacaaaaacaaccaaagcaggaaattcttgtggtaaatgtaaaggacaaattggagaaatactaaaatgtacattaggtgatgaatttgtagctgctaaaccaacaggtatttgtgcatgtactgatttgacacgtgatgaaattgttacccaaattagagctaaaggtttaaaaacgtcaaaagaagttcgtcacgtacttgattttaaagataaaaatggttgtccaaaatgtcgcccagctattaactattatctaaatatggtatatcctcatgaacaccaagatgagaaagcatcaagatttgcgaacgaacgttatcatgcaaatattcaaaatgatggtactttctcagtgattccacaaatgcgtggtggtgtcacagatgctgaccaattaattcgtttaggtgaagtagcgaaaaaatataacgtgcctcttgttaaagtaactgggtctcagcgtgtaggattatatggtcttaaaaaagatgagttaccaaaggtttggaaagatttaggtatgcgttctgcctctgcatatggtaagaaaacgcgttctgtgaaaagttgtgttggtaaggaattctgtcgatttggtacacaatatacgacacgtttaggtattcgattagaaaaaacatttgaatatatagacacacctcataaatttaaaatgggtgtctctggttgtccaagaagctgtgtagaatcaggtgttaaagactttggtgtcatttcagtagaaaatggctatcaaatttatattggcggtaacggtggcacagaggtcactgtaggtcaattactcactactgttgaaacagaagatcaagtggtacaactgtgtggtgcgcttatgcaatattacagagagactggaatatatgctgaacgaacagcaccatggcttaaacgactaggatttgatcatgttaaagaagtgcttttagatgaacaacgtcaaaaagaactttttgatagaattatggatgctaaacaagcacttgaagaagaaccttgggaagctattgttgaaaataaagaagcacaaaaaatatttgaagtcgagaaagtgtgaggatgagtgtaatggaaaaagttaaagtaacaactatggatgaattaacaccattaattggtaaaaaagttattgttaaagataaacaaatcggtatatttttaacagaaaatggacaagtgcatgctattaataacgtgtgtccacataaagaaggaccgctatctgaaggtactgtaagtggagaatacgtttattgtccactccacgatcaaaaaattgatttgaatacgggtaaagtgcaagaacctgatacaggttgtgttgaaacatatcaagttgaaattcaagatggagacgtatttatatgtctctagtcactaatagtgaatttggaaaagtatatttaattggggctggccctggcaatcctaatttgctaactaaacaagcagaacgattaattcgtcaagcagatgttattttatatgatcgtcttgtcaatccattgatattacaatatacaaagccaactactgaaatcatagatgttggaaaaaaaccttatactaaacatattcaacaagaagatattaatttaaaaatagtagcagcagcgaaaaagtataaagttgttgtacgtttaaaaggtggagacccagcagtatttggacgagtaactgaagaaatagacattttaaaagaacatcagattgcctacgatattgtacctggggtaacttctgcgagtgcagcggtagcttcattagacttaggtttaacgatgcgttcagtagcaccaagtgttacattttctacaggtcattttaaagatgatattgatcaagacatggatatacgtaatttagctaatggtgggactttggcaatttatatgggaattaaacgattaaattatattattagtcaaattagaagatatactaaagaagattatgatattgctatcatttttaatgctacgtgttataacgaaacaatagtagttggtaaactaagcactattgaatatcaattatctaagcttaatattaaacatgatccaggaatttgtatattaggccatatcattaactatatggatgacgaaaagattatacactcaaaacaaacaatagatgaaacattgtacgttattaaagggaataaagaattagcactttccaaagcagaagacttatctcaacagtatttaaaatgcttaattcaatatgatgaaacatatcattcttctcaaaagtatttatatgaatcgattataacgcagcaccaaaatattaaatatattgaagtatagttctttacgcttcgaatgtcataagtgagataacacgatatttaaaacgtgtgttatctcactttttttagggattcttttatatgaaataggtaattccctaatataaaaaccatgtgaaaaaatgtacaatttaaatgaaatttctttaaataacattgaacataagtaacgtatgacctttgcaggtaggaggatttatataaatgggaaaattcggattaaactttttcaaaccaactgaaacgtttaatggaaattggtcagtcttagaaagtaaaagtagagaatgggaaaaaatgtatcgtgaaagatggagtcacgataaagtagtaagaaccacacatggcgtaaactgtacaggatcgtgttcgtggaaagttttcgttaaaaatggtgtgattacgtgggaaaatcaacaaattgactatccaagttgcggtccagatatgcctgaatttgaacctcgtggatgtccacgtggtgcgtcattttcatggtatgaatacagcccacttcgtgtgaaatatccttacattagaggtaaactattagatctatggacagaagcacttgaagacaataatggaaatcgtatcgctgcatgggcatctatcgtcgaagatgaaaagaaagctaaattatataaggaagcacgtggtaaaggtggacatgtacgtgcaagttggaaagatgtaacagatattatcgcagcacaaattctttataccattaaaaaagatggtccggatagaatcgctggttttacacctattccagcaatgtcgatgattagttatgcatctggtgcgcgttttattaatttattaggcggagaaatgttaagtttttatgattggtatgctgatttaccacctgcatctcctcaaatttggggtgaacaaactgatgtacctgaatcaagtgattggtacaatgcctcttatatcattatgtggggatctaacgttccacttactcgtacgcctgatgcccattttatgactgaagtacgttataaaggtgcaaaagtggtgtctgtagcaccagattatgcagaaaatgttaaatttgctgataattggttagcacctcatccaggaacagatgccgcagttgctcaagctatgacgcatgtcatcttacaagaattttatgaagatgaaccaagtgatatgtttgttaattatgccaagcaatatacagatatgccatttgtattgatgttggatgaagatgagaatggttataaggcaggacgatttttacgtgcaagcgatttaggcataaaaagtgaaaatggtgagtggaaaccagtgattcacgatgcaattagccatcgacttgtcgttccaaacggtacaatgggtcaacgttgggaagaaggcaaacaatggaatttaaaacttgaaacagaagatggaagtaaaattgatccagctttatctgttgcagaagaagattatgagttacaaaccattcaattcccttactttgatagtcaaggagacggtattttcgaacgacctattccaactaaaaaagttaaattggcagatggtaaagaagtacgtattgctacagtatatgatttaatggctagtcaatatggtattaaacgatttggtcatgagttagaagctaaatcttatgaagatagtgaatctaaatatacacctgcatggcaagaaaacgttacaggtattaaacaagaattagtgacacaagtcgcaagagaatttgcacaaaatgctattgatactaaaggacgttcgatgattattatgggtgcggggattaaccactggttcaattctgacaccatttaccgtgctgtattgaatttagttctcttatgtggatgccaaggtgttaatggtggaggttgggctcactatgttgggcaagaaaaatgtcgtccaatcgaaggatggaatactgtagctttcgctaaagattggcaaggtccaccgcgtttacaaaatggtacaagttggttctattttgcaactgatcaatggaaatatgaagaatctaatgtagataaattgaaatcaccacttgctaacaacattaaacatcagcatccagcagattataatgtgacagcagcacgtttaggttggttgccttcatatccacaatttaataaaaacagtttgttatttggtgaagaagcaagagatgcgggcgatgattcaaatgaagctattttaaaacgtgcgattgaatcagtgaaaaataaagaaacagaatttgctattgaagacccagacttaagaaaaaatcatcctaaaacattatttgtttggagatctaacttaatttcaagttcagctaaaggtcaagagtactttatgaaacatttacttggtacacgttcaggattaatggctgaaccaaatgaagatgataaaccagaggaaattaaatggagagaagatacagtaggtaaattagatttacttgtatcattagattttagaatgactgcaacgccgttatattctgacattgtgctgccagcagcaacttggtatgaaaaacatgatttatcttctaccgatatgcatccatttattcatccatttaatccagcaattgatccattatgggaatcacgttctgactgggacatttacaaaacattgagtaaagcaatttcagaaatggctaaagattatttaccaggcacatttaaagatgtggtaactacaccacttgctcatgattctaaacaagaactaggttccgaatacggtatcattaaagattggtctaaaggtgaagtagaaggtattccaggtaaaactatgcctaacttctctattgtagaacgtgactatactaaaatttatgataaatacgttacattaggacctttacttgagaaaggtaaagtaggggcacacggcgttagttttagtgttaaagaagaatacgaagagctaaaaagcatgattggtacatggaatgatgacgatgaacattctgttagaaatgatagaccacgcattgatactgcacgtaaagtagctgatgcaattttaaatatctcttcggcaacgaatggtaaattatctcaaaaatcatatgaagatttagaaaatcaaactggaatggaattgaaggatatttcaaaagaacgtgcatctgaaaaaatttcgttcttaaatattacagctcaaccaagagaagttatcccaacagcagtattcccaggctctaataaaaataatcgtcgttattctccatttacaacaaatattgagagacttgtaccttttagaacgctaactggaagacaaagttactatatcgatcacgaagtattccagcaatttggtgaaagcttaccagtatataaaccaacacttccaccaatggtatttggcgcaagagataaaaaggtaaaaggtggacaagatgcacttgttctacgttatttaacacctcatggaaaatggaatattcattcaacatatcaagataatgaacgtatgttgactctattcagaggaggtccagttgtttggctatctaatgaagatgctgagcaacatggtatcaatgataatgattggcttgaagtttataacagaaatggtgttgtaactgcaagagcggtaacgtcacaccgcatgcctaaaggcacaatgtttatgtatcacgctcaagataagcacattgaaacaccaggttctgagattactgatactcgtgggggatcacataatgcacctacaagaattcacctaaaacctacgcaattagttggaggatatgcacaaattagttatcacttcaattactatggaccaattggaaaccaacgtgatgtgtacgtcgcagttagaaaaatgaaggaggtaaattggcttgaagattaaagcgcaagttgcaatggtattgaatttagataaatgtattgggtgtcatacatgtagtgtgacatgtaaaaatacttggacaaatagaccgggtgcagaatacatgtggtttaataatgtagaaaccaaaccaggtgtaggttatccaaaacgttgggaagattaagagcactataaaggtggttgggtattaaataaaaaaggtaaacttgagcttaaatcaggtagtaagtggtctaaaattgccttaggtaaaatcttctataatccagatatgccgttaatcaaagattattatgaaccatggacttataattatgaacatttaacaacagctaaagaaggtaaacattcaccagttgcaaaagcacactcattgatttcaggagatagactaaatcttgaatggggaccaaactgggaagatgatttagctggtggacatgtaacaggaccagaagatccaaatattcaaagaattgaagaagacatcaaattccaatttgatgaaacatttatgatgtatttacctcgtctatgcgagcattgcttaaatcctagttgtgttgcttcatgtccttcaggggctatgtataaaagagatgaagatggtattgttttagtcgatcaggatgcatgtcgtgggtggcgctactgtatgacaggttgtccttacaaaaaagtatatttcaactggaaaacaaataaagctgaaaaatgtacattctgcttcccaagaattgaagcaggaatgccaactgtatgttcagaaacgtgtacaggaagaatgagatatttaggcgttttactatatgacgctgatcgtgtacatgaagcggcttcagctgaaaatgaacaagacttatatgaaaaacaacttgatatcttcttaaatccatttgatgaagaagtgattgaacaagcagaaaaagatggtatcagttatgaatggatccaagctgctcaaaattcacctgtttataaattagcaattgaatataaattggcatttccattacatcctgaatttagaacaatgccaatggtatggtactgcccgcctttaagtccaattatgagttattttgaaggtaaaaattcaggtcaaaatcctgatatgattttcccggccatcgaagaaatgcgtttacctattgaatatttagcaaacttatttacagcaggtaaagtagagccagtgaaagaagcgttacaaaaaatggcaatgatgagaagttatatgcgtgctcaagtcacaaacaaaccatttgatacttctagattagaacgtttaggtttatcagaaattcaaacaaaagaaatgtatcgtctattaggtttagctaaatatgaagaccgatttgttgtaccatcttcacataaagaaacctatttagatacgtatcatgctcaaggtagtcaaggatatggcggtgaatatttcggagacaattgtgaaggttgtggtgttccagtaggttcaacgtcaggaaaatctagtcaagaaatttataatgagaatttctatggaggtattttccgtgattaatctaacgcaatttaaatactatcaagaaagttttggatatcttgcacaacaacttaattttccagaaaaattaacctttcatcctaatacatttgaagaaacgattcatccttcacatccaggatatgcagatttaatgaaatatcgtgaaattatgtatcaatttactttatctgaaattaaagcaatttatacggatacatttgatttcaataaaacatcaccactttatatgacttacaataaatttgatactcaaaaagaaagaggtcaaatgctcgcaaaacttaaagtactttatgaaatgtttggattaaaaatggtagataatgaattatctgattatctaccattgatgttgcagtttttacacgtagcaagttggcataatgatcctcgtgcagaaggcaatattgagttagtgattatgattattgaagatggtacatatgaaatggcaaatcaattagctaaggagaataatccttacgcttatgtgattcgtgcattacgagaaacattaaaagcttgtttagacattccaaaagaggtgacacatcatgcttaatcaatttctttggattatttacccatatttatgtgtggcaatttttatcgtcggtcatattgcccgatataaatatgatcagttttcatggactgcaaaatcgagtgagtttttagaaaagaaacaacttaaatggggcagtctgttatttcacttaggaattattccagtattttttggccatgtggtgggattagctattccagcagaatggatagatgggcttggtataagcgaaagtacatatcactttggagctgtttatatcggtagtatttttggtataatgactctaattggaatgttacttttaacagccagacgtttaactattagtaatgtgagaaagttaagttcagcgtctgatattttcgtaaatttcttattaatattgattatatttatgggatgtttctcaacattagttactaatgcagtgataactgactttgattaccgtcaaacgatttctatatggtttagacacttatttacattttcacctaatgcagcactaatgacaggcgttccattatcatttaaaattcatatcttattaggatttacaatattagcttgttggccatttacacgtcttgtacatgtatggagtattccattagcatatacaaatagacgttatattgtatatagaaaacataaagcacctcgtgcacattaaatataaaaggagtacgatatatgattccggaacctttgtttgaaccggtacattttcagcaagagcttgacacacttagaaaaaaagaaaactgtgattttgctggtgttgcactatatgaaaaccacgaaccttctggacctataaaatggcaatatgtttcaggtaatctaaacaatcgttataaattgattgttttgagaaaaggcagaggcttagctgggacagttatgaaaacaggaaagcgaatggttatagaaaatgtttccaaaacaataacgccagaagaaaaaattaagtatcccattttgatgagtgagaatttaaacgcgctcgtcgctataccattatggcatgaacagcatgttgcaggcgtgttattattaggacaaagaggtagtaaaacattgcctaaagtgattagtcaattaaatattaaaggccgtttgtgggaatttaatgaagaaatctaggtgatatatgtgttagagttgtataatctgaaaatggaagatttactaaaaaaatattatgaaactacaaatgaaaaaattgtttttgtaaacaaagaaggaaaagtcattgcaatgaatgacgctgctgaagaaattatttctaaagataataattatagtgcgatgacaaatgcaatttgtgaccgttgtgaagggtattcaaatgaatttgaacttcaaagttgcaaaaattgttatttagacacatctaaaccgaacgatatcaattttcaagtgtttatgaaaacagtagatcataaagttcgaccatttacagcttcttatcaagcgattgatgaagataatgagatatatgcatttacacttcaagatatttcgccgcaaattgaaagacaagaaaaaatgtatcaacgtcagatgatgagaaaaacaatttccgcgcaagaaaatgaaagaaaacgtatttctagagaattacacgatagtgttgtacaagaaatgctaaatattgatgttgaactcagattactgaaatatcaaaaagaatcctcagaacttgtccaacaatcacaacgtattgagggattaatgtctaaattgattgatgatatcagacatctatcagttgaattaagaccctcatctctagatgatttaggcttggaagcggcttttaaatcatattttaaacaatttgaaaataattatggtatgcaaattgtatatcagtctaacattaaagataaaagatatgatagtgaagtagaaacggtggtttaccgtgtggtacaggaagcggtatttaatgcattaaaatacgcaggcgtaagttcggtagatgtctttgttcaggaggttggacgtttattaatggctgaagtgattgatcatggacaaggttttgatccgaattctcaaccacaaggtacaggactagggttgtatggtatgaatgaaagagcagagcttgtaaacggaaaagtaaatgtagaaacacatttaggaaaaggaactattatcactttagaagtgccactctagagagcgtaaagggactgacttataattgaaaatagtaattgcagatgatcatgcagtagtaagaacaggtttttctatgatattaaactttcaagaagatatggaagttgtagctacggcagctgatggagtagaagcgtatcagaaagtgatggaatacaagccggatgtattaattatggatttaagtatgccacctggtgagtctggcttaattgctactagcaaaatttctgaaagttttcctgaaacaaaaatattaattttaacaatgtatgatgatgaagaatatttgtttcatgttttaagaaatggtgctaaaggatacattttaaaaaattcaccagatgaacaactcattttagcagtacgaacagtgtataaaggtgaaacgtacattgatatgaaactaacgacgtcattagtaaatgaatttgtaaatgtttctaatcaagatgaaaaagcaactaatgaccctttcaaaatactttctaaaagagaattagaaatattaccattaattgcaaagggatatggaaataaagaaattgctgaaaaattgtttgtatccgttaaaacagttgaggcacataaaacgcatattatgactaaattaaatttaaaatctaaaccagagcttgtagaatatgcgcttaagaaaaaacttttagatttttaaatatattgaaagacttaaataatgacactcatattatatttcaccagcacatgatattcatgtgttggtttttctttgtctcattatttaaatatagggggattattagagagtataagggaaactccttatgttcatattttcacaaagtgattaaaatttaaatgtaatcaataattaatcacacaaattaactatattgatatgtgatttaattagagataatagaaaattgatgaaggtgaaaaaatgaataaaactaaaggtggttttcaacttacgttacaaactttaagtcttgtagttggattcatggcttggagcattatttctccattgatgccatacatttcacaagatattaaaattaatccaggacagttatcaattattttagcgataccagttatcctaggatcgattcttcgtgtgccatttggttatttaacaaatattattggcgctaaatgggtattcttttgtagttttattatattattatttcctattttcttcttaggacaagcccaatcgcctggtatgttaatggcgtctggattttttttaggagtaggaggagccatcttctctgtaggtgtcacttcagttcctaaatatttctcaaaagacaaagtaggattagcaaatggtatttatggaatggggaacattggtacagcaatttcatcattcttagcacctcctattgcgggtattgtaggatggcaaacaacagtaagaagttatcttattattatcgctatttttgcaatattaatgtttttccttggagatgctaaagaacctaaagttaaagtacctttaggcgctcaagttaaagatttatcttcaaactacaaactatattatttgagtttatggtactttattacatttggtgcttttgtagcatttggtttattcttacctaactatttagttaataatttcggaatagataaagtagatgcaggtattcgatcaggagtatttatcgcattagcaacattcttaagacctgtgggtgggattttaggagataaattcaacgcggttaaagtcttgatgatagattttgttgtgatgattatcggtgcagttattttaggtgtttcaagtcatattgccttatttactataggttgtttaacaattagtatttgtgctggattaggaaatggactcatctttaaacttgtgccatcttattttgctaaagaatctggtactgcaaacggaattgtttctatgatgggagggttaggtggtttcttcccaccacttgttatcacgtatgttacttcattgacaggttcaagtcatttagcatttattttactagctgtatttggaatacttgcttttattacaatgggtcatctttacaaaaaagaatacgcaaaataaatatacaacgtagtgcactagcactacgtttgtttactattttttcaataatctaatgtaaaatgaaagatgaatacaacgtactttgatgagaggttgaaataatagcacaagctgaaactaccctctaaaagagtaaggcaataatacgaagaattataaataagccagtaaatgaatgtctaatcacccatttactagctatttttctgaaagttatatctcaacttcttttatttattctactgtaattgtagtaccttcgtcttcttcagtgacattcttaggtaaaatcaccactaaaacaccatcttcataacttgctttgatttgatttttattaatatcttcgaattcaaagcgtcttaccaattctccgcttgagcgttcacttaattgaacactacctgtttgctcagatacttgtttaatgactttaatcgttaaagtagcatgttcatatttaagatgaatgtcttgtttctttacgccaggtaattcggcttctagaacatattgatttttttgactgtaaacatttgttgggaagcttttagttgaaaattgattaaatacttgttcacctagatcacgaaataaatctcttggattatttttaaaaatagcttgatcaaaaaattctctattattcatatatgaaatctccttttcagagtaatatgtcataaaatatattgaaattttacaatatcattatataaatagagatactacacgtaaagtaaaagcaatttgaaagtttgaagaattaaaaagtgaaagatgtggaataaagaaacatgacaaaagacgtcgatattatgtattagttagaaaataaaagaaagaaggaacaataattacttagcttttgtcatgtgtattaactattcagcattagagccgaagttctctgaaataatatgtcttaagctactagcaaggccatccgcttcatcgtcagaaatatcaaaatcaataaacacttgattagaaatttgctctaatactggtttaatgtctctaccatattgagttaatgaaatttgtaaattacgttcatcttctttttctcgcatgcgttgtacgtaaccttttttctctaatttttttaagagaggcgttaaagttccagaatctaagaagacacgttgaccaagggacttaatgtttattttttcgtcgttttcaatagccataagaaccataaaacttgtgtatgttaaatcatactcttttagatagtgagtatattttttaattacctcttttgaagtaacataaagtaaaaaacataattgtttacttaaataactgtcctttacatacatatttttcccccctcaacttatttaaagatagtatgaacaatagctaatgtcaagactattgtcagagtattatataagttttttaataaatttaaaaataaatttaactaaggctacatataaatttagaatgttgatttatttcaaattctaaattaaattattagtatattttgttacaaaaaagaggtatcactttaaaaaagttattatttcattcataattatttaaatgataaaagaagctattttattgagtaagaggatgaaggagtgctctgatgagtaagaagcaaaagattattagaattattattatattagctatttctcttgtattagctattgcgttcttctttggaacgaaagcgtatcaagggcataaaaatgtacaacttgtagacaattacatagaacaaaaacatttgaaagataaaattaaatcagaaaaaacattatatagtgctaaaagaggcgtctattataaacaagtagtgtttaaagacgagcctaatttaacatatatcattcagccaattggtacacgtaaaggtattttagttgaaggctttgatacggaaaccaagaaaagcattaaaagtgcaaaacataactatttcaaccaaaattataagccatgatatataatcaatatgtagaactagagatattaatagtgattactactcaaaaaaacaatgtctatggaaaaatagatattgtttttttaaatgaaatttttgttaaatggtaaaggtaaacgagttagttaaaaaaggttttagagtaatgtaattcatttatcaaccgctcttactcttacattgagaaggttaaagatagtgattgaattccaacatctatattctaaaaatattctcatttttctgtttttaattaattatttttgccaaattaaatatgtatattatttaatagtttttaatttgttatatccgaattttgaataatttgatataattaagcgatgtcagaagaagggggtttcaacgtgactctgttcaagagaaaagttagcctacctatgcaagtattaattgcattagtgctaggtgtagtaattggtttattattatttggacaaacaggtgttgcaaattatattaaacctttcggtgacgttttcttaaatttaatcaaaatgatcatcatcccaattgtattctgttcacttgctttatctatttcgaatttaggggattcgaaaaaaataggaagctatggatggaaatcaattctttatttcgaaattattacaaccatcgccatcggtttaggtttaattattggtaatatttttaaaccaggaattggattagatcctgataagttacctaaaggcgatattactaaatatcaatcaactgcgtctgccgcagaacaatctacatacggtaaccactttattgatacaatcgtaaatattataccaactaatatttttgaagctttaactaagggtgagttattgccaattattttcttcgcagtattctttggtttgggattagctgcaattggagaaaaggctgaaccagttaaaggtttcttaaacggtacattagaagccgtattttggatgattaataaaattttaaaattagcaccaattggtgtatttgcatttatttgtacaactgttatgacattcggtgcttcagctttaattccattagctaaacttgttttagtagttgtatttgcgatgattttcttcattattgttgttttgggtattgtagcaaggatttgtggaattagtattttctcaatcattaaaatacttaaagatgaattattgcttgctttctctacttcaagttctgaagcagtattaccagtaatgatgagtaaaatggagaaatttggttctccaaaagaagtgacttcttttgttataccaattggatattcgtttaatttagacggatcagccctttatcaatctatcgctgctttatttgttgctcaaatgtatggtattcacttatcattatctgaacaaatcattttaatggtgacattaatggttgcatctaaaggtatggcaggtgtgccaggagtatctatcgtagtgttattaacaacattgggggcaatgggcttaccagctcaaggtcttgcgttaattatcggtgtagatcgtttgttagacatggttcgtacatgtgtgaacgttattggtaatgcattatctacagtagttatctctaaatgggaacatgtctatgataaagaaaaaggtaagaaatatctagaatcaatttaaaaaaggacatctgacatttttagcgtcgcttggataagcgatgcttttttattcaaacaaaaaagcgagataactgatttcaaatgaatgttatctcgctctttacactttctaatatatcaaaaactacatgcctttcatatcatgcatttcatgaattttcatcatgagaccatgtggcacatcatcatgatttacttttgatactctagaaaatgaatcagaacctttttcttttactaaaaagacaaaatcgccttttttcacttttacattagtgttagatggtaatttaacatttttctctactttttcagtttgttcatttaccattttatcaatagtgtgactatctttcatatagccatagtatgattctttttggtgaccatttagcatgacaatggctaaaataatgctaacaattaacataattgcaattaaagcaattcctaaccctaaaccttttttgttcttcattaagactctccttaaatatattaatttatttgtacaaaaaatagaattaaattacaataaaagtttcacaaaaattcaattgtacttcaactaatataaatgaatcattataaataagcaaataagagtagatagaattcatgatacattctatctactcttattaaaaataaaattaaagatcaattgtgattggtgtatcaatatcatcatcattcattaaagtaatcgtttttggatttatttttaacacacataaattaggatcctctttggaatcgaagaatgttttatcttgtgtttcccacaaccaatcaatgactttctgatcttctacaatgtcaatacttgcttctatttcaacaaaactattatttgttgtttcattatatcctagtaaaatatatgcttctggattactttgaatttcttttactttagaacttttattgcttgtttttgtatataaattaagaccatcgttatagaacaccatatatctgctattcggtttattattatatgcagttgataatacgccaattttagaagtatttaaaactttctcaatcgcttgagtcactttttgtttgtccaaactaatcatctccttattttattaatatccctttaaaattaattttaaacagatttgatataaatatatttcacttcatcatgatgcaatgtcatattaaatggatggttgttttcttcttgtataaatagttctgttttaggttgattgcatctatctaattgatgaataatacttttttcgatgtatacaggtaaattatcttgagacattaattgatgaatcgtcccatgttctttatttaatgtatttgcgataattaagctgttttcatttaatttatttagtatttgataatgttgtttactgtcagacaagtagcgatcattaattttattaaataagataaaatgataatttccatctttttgactcattaaataattatttgaaatatggataggcacatcgataaatgctgcaataaattgatacagatgcataattgggagtaaactcccatgtcgattaaataatgcaataaacatcggatcatcttcaaaaaggtgatagcaaataccgcctccatattttaatagtgccgttaaatgacaaactaaatctgctaattgaagtggatgtttaccgtcatttgtatacttaaagcaacgtaatgataagctactatagacaaattgagtcgaaggtatattagaattctttataaaatgaatgtagttttcgaagtgggtatttgcatgagtaaatccgcgttggtgttcaattaatatatttttcgtatcaatattttcaatgtcaacaaaatagtaatcaaaattaagacgcttcattgtatcatagacctcttgtaacttttcatactgatgtaataatccttccactaaaacaccatatttaatcgaacgatttttgtttctaagttttaaatatgatagatggatatcttgaatagtcattgacttggtatcaaatactagcataaatcgtacactttttttattccatttataatcttgattattttctaaaaacgtcataattaaatcgtaaaaagtagtgaactcagatttatttttgataacgacggctaaactgatatttttttcaaataatttttcgaagcagcgattgagtaaggttccgttaattgaatgttgattcatatcactcatatcattaatcaaaatggctggtttaggtaaataagataaatcgatatcataataatcattaaaaacaaactggaataattcgttaatatttttaaaatgaataaatgcctttgaagaacgagtatgttgaagggcttctaattgctcaagatcaatgatagtcgtttcggtagataagtgttcagttgtttcaaattgagagattaattcaaaatacttaggttcaatgtcactcttcaatcgtatcgcagatatatgatcagaatgattcagttgagaacgaaatcgttttggacttaaattaagataatttttaaattgattagtaaaattggtatgactactaaaaccagattgttcagaaatacttgtaatagagtcattcgtacaaatgagtaacctaatagcatgattgattttcaaacttgtataataatctttaaaattaatattcaatatacgtacaaataaatttgaacaatatgactcagaaataagtgcatgtgctgcaatatcttgtagagagatattggaagtaatgtgatcatgaatgaatgtaagtatatttgttaagatatgctgttcaacaggaatctttggaatatatatgaggatgtctaataactgcttctttataaaaagtttgtatgatctttggaatcactttgtcatcatgatgagacgtgttgtacatatgttctatattatttaaaatgattgatttgataaaataacttgattgtaagagatgagcatcaaagtggcaattaaaaaaagcagcgtcttcaagataaaagtaagccattggtattttgagctcaattagatttcttcctttattaatttgatataaatcgccttgattaatgattgcaatatgatttgataattgatgatattttccattgattgtcatttctaattcattagttaaagaaaataatataagaacatgattgatgtttctcctagtcatagaagtaatattttcatgtaaaaaaagagtactgctcataaataagtctcctcatcttgtatagtatttgtgtgtgggatttgggtctgtttgaataataagagttattatatatgaaaataaatgagatattaatagttaaaaataaaaaatttttgtttatttttaactgaaaacgataacaattttatagatgcacaatattattattttttttagaatgtcgcatgagactattggaaatttttagtaggttaatgaaacgaatttaaatgcataataaatatagattttgagtgaagagatataagatatcaaataatgattcacttgaaattaacaatgactaattctgtacatacatcacgatacaacatcatttgaatatgtagcatcaagaatgaatttacttatatatttgatgtaagccccatatatttaaaatcacttttaaaatgtatatcaagaaataacatcttagagcattagcgacagatatacaatagtttaatgaaactaacgattacggtgatttaaatagaaaaaaagaacattactccttagaataagcaacttagaatagaagatgcatacaaatataaaaaggtattaacagtagctaactattatatttagaatcattataactccccaaaaatttctatttaatgtgtaacagttttacatcataacatctaaatatacttttacttaattaaacatcacgaattatattcaaagttaagaatgtcagaattagtattaaaaaaatcctgggataatgaattgtcccaggatttttgatgtattagtaagtaggaattaataggtatgtttattgcgtttataattgccgtgattgtcactttagttttatcacgaagaaaagcttacaaagctgcagcagaataaaaaagtaactcttgcgatatattgcaagggttacttttttattaaagtttttgcttacgccataagaaaatacttacaatagtgactaatatcaaagagattcctacaataaccagccacgaaacgtaactcttatcatcaataggtaatggaacgttcataccaaagaaactaaagacaagtgtaggtagtgttagtaataccgtaaaaagcgttaatgtcttcataatattgttcatttcatttgaaagtaatgaagaatacgatgacgtgatactttctaaaatacctgtgtataattcagttgtttcaatcgcttggttattttcaatgactaagtcttctaataaatcctcatcttcttcaaaacgtttaattgcaggcaaacggaataattttttaataatcgtatcattcccttttaaagctgctaaaaagtaaaccaaacttttttctacttccattaaacgataaagttgtttattcgtaatactatttttcaaatctctttcaatacggattcttgatttatttaaaagacgcaaatttctgttatagtgatttgaaatagtaagtaaaatatctaaagcaaagcgactatgaaattttaaatttacgttatcttgtcttgaataattttcaagaaattcattttcagcatcacaaattgtaaaaatcacaccatttccaatcacaatacctagaggaatggtaacaaatgagagaacatgacgattcgtagaacttacaataggcaagtcgacaataataagagaatagccagtatcttcatcatattcaatacgtgcactttcatctgcatcaagaggatcacgaataaaatcttctggcagattgtactgttcaattaaatgctcaatttcttctctatcaggttcgacaacatttatccatgatgcagattggtttatatttgtttcaactatttcattagtagttgagtgtttatatgcagtcaacataatcgatagttcctttcttagtctttatttcgctgtgtcaatatttaaagttttatattgatgctgaaccatgattcttaaaggtccattataaataattttaaaaatatgattggttaaatcttcaactgaaagacggtggggatcattcacccaaaatttaacagtagatattgttgcaccagcaacataactatgaaaatatttttctggtataccttcaatctcatgatttgtactaatatatttttgcatattttccccgattaaggaataaattttttcttcaagttttgacttcctatttaattgtaagatcgtttgataaaaagtaatattatccgaaatatgttgaagcatattttttaaaataatattaataaaatttttagcagtatcttctggatcttttcccataatattatgaagatgatttaagaatgtcatttgagaaataaattcatcttccatatctgataataataaatatttatcttcataatgtaaataaaaggtacctctattaatatctgcacgatctgcaatatcttgaattgtaattttttctaattccttttcatttaataattcgataaatgaagacttaattgctgacctcgtcttacgaactctccgatcttctttcattctgcatcaatcctttataattaattaacaatattaggcataatgttcattaattaacgatatgatcattattgattattgtattgaagtgataacctcattataatttacaacgtattaaatattcaacacattgttcaataaatatagggaggtaagtaaaaatgaatattttttaaaagtaaattactatggttagcaccaattgcagctattttattattagtgatattctctttagtgttttatcctgcattcaatccaaaaccaaaacaaatacagattgcagtggtaaataatgacaaaggtatagatattcaaggtaataaagtgaatattggtaaaacaattgaagataaattaatggatagtgattctgatattgttaaatggattaaagtagataaagaatcagatattaaaaaagggcttaatgatcatgaatattacggcgcagctatttttaataaaaatttttcaaaaaatgcaatgagtaaaacgcagttgattatttgaaaaaaggtgtattatattatttagatatctaactaaatgagataggcacaaatagaatataattattaatattgagttagtgtgttagcatatgaaacgaaacattatcctagtactatttatattaaatgcgttgtttggtttaacaggggttgtatggtcattattaatcgctgaaacactttgttcactgttagcaatgtttattgtatatgtttaaaacacaagttaactgtggacactcaagtgttagtagaagaataaaataatttgatattaaagcgagctataagggaggagatctcttatttagctcgctttaaatttatataaacgatgacatatgataataattattgttaaataagttatattactttattattgttaaatgagtattttttataggaggacgtcaatggtcattttaaagcgaagttctaaagtagctatagcgttattgatgatgttcctatttttattcgtgccgagtatgacaaaaatagcttctgcgcatgctactttagaaaaaacaaccccagcacaaaacggtatcgtatcaaaacaaccagatacaatcgaattaacatttaatgagccagtaaatgccgaatattcagggataacgatatataatgataaaggaaagaaagttgctgatgttaaaccgagtacaataggacattcagatactttatctttctcaggcaagcaattaaaagaaggtacacaacaaattaaatggcatactgtatctgctgatggtcatgaaattagtgatcaatttgaattttcagttggtaaaaaaacagccaatggtgtagatactactcctgttgcatatgaaacgcctgcattttggtttggtgtgtttagatatatcgctgaaggcgcaacaattattttagttggtttatattggttaaacggtattgcacgtagaaataatttatcaacatttgatattttccctagacatgtcgctgtatcattgatcatgatgatggcatatattatgtcacttgtactttatctgatgactctatcatctgatattttggattcagttttaacatttaatccaagtgtcttaattcaattcccatatatactgagcgctgttgctttaattattttaagtggattatttgtattaagaaatatggaacgaacatggtattgggctatttcgataattatgattttagctttaagtatgtcaggacatgcttggtctcaaagtgcacctgtttggtcaattatacttagaacattacacttagctggtatcagtttatggctaggcgcattaatttatttgttttcttcagtatttactaaaaaacgagatgcagttgatttattgcgagaaatcttatttaaagtgaatggagctgctgttgcagttatcattattactggtatattaatgtcgattgatgaaactaaaattttatcaatatggtctaatatgcaaacgtggacaatattattaataattaaaatcgtaggaacattaatgatgatggctttaggctttatgcaaacaacgcgcgccttaaacaaacgttatagaattaataaagtctctttaatcgtagaagtttctattggtattattttaatacttgttggtgttattatgagtcaaattaatattccataaaaggagattgtaaaatatgtttaaaaaattatttgcttcaggtttagtgttcttcttttcactaggtttatttaaatatgctgatgcacatgtaacgataaatccaaaagcagttgaacctggatcttatgaaaaagtggatgttcgagtacctgttgaacaaaaagatcatactgaaaaagtcgaattagatattccaaaagaagtacaagtgtcaaatattcaatccgtagaagggtataaatatagtttagataaagacaaaaaaggtaatatcacaaaaatcacctggaaagcgaaagataaaggcattggtcctaatgaatttgtcgaattcccacttcttgtagaaagtcctaaagaagaaggcacatattcatttaaagctgtgcagacatacgataataaagataaggtaaaatggacgggtaaagcgaatagtgaacatcctgctccaacattggaagtggaaaaaaatgcaaatgctgtaactgttaaagaagacaacgctaaaaaagatgaaagaagtcaatcatcttcaggtggttctatcgcattgtggattatttcacttgttgccattattttatctttagttgcattatttaaacatgcaagaaataaataagacatataataaagtgatttctagtgcttgctagaggtcattttttcgtaacatgatttgattacaaaattttgtcactttaaagacgaagataatcgattataataattgaagtaagggaggattttttatgcgcagattattatacgcttttttagtctatatgattattggacttgtaagtggattttactacagagaattaacgaaagcacatgattttacgggcgatacgcaactagcgcttgttcacacacatacattaatattaggtatgtttatgtttttacttttacttccgcttgaaaaagtatttaagttaagtagtttttatttatttaattggttcttcattgtatacaatgttggtgtcattattactgtaggaatgatgctaacaaaaggcacttaccaagtcactggaaaaagtttttcaccagaagcatttgctggatttgcaggtatcggtcatacaggaatgcttgctggcttattattacttttctttttactaagacaagccattttaaaagaaccgagagattaaaataataatttgagacacaatagattcaaacctattgtgtctttttttataattaagaataaagagactaaaagaggaggacgttttaatgattcattattcaaatcatccaccaaatgttaaagattattgtgaattaagagcaaaagcaggtatgagttctaaatcagaaacagcagcaaaaaaaggattaccccatgcatgctttaatattactatttatgaagaatcaacattgattgggatgggtagagtgattggagatggaggaactgcatttcagattatagatattgctgtccatccatattatcaaggacaaggttttgggaaagaaatcttaaaacaagtgatgtcatttattgaaaatcatgcagaaaaagggacatatgtcagtctgattgcagattatccagctgatcaattatataagaagtttggatttcaatctaccgaaccaaaatctggtggaatgtttaaaaaatattaaagaaaatagatgagattaaattaaatttcttttaagttctttattttatgtctagattacgctttacgtaaatattctaaataaaaatctctaggtgatggcttctagattaaaaaatataagtgaatttttaatttttaataagctaaataaattctgaaacaattatttgaagtgcatctagtatataagttaaatatattatttaataaaatattcataaaataatatacacatataaaatgaatgatgataatatataaatgaacaaatacacctattgttcagtacaatatagtaaatgattgtgaaacattgagttataatatagtttttaaataaaaatgtttcatcatttacacctatacagctaagaataaacatcaagaataggagtgaataatcactgtgaattatcgagaaaaattacagaagtttagtatccgcaaatatacagtcggtgctttttcaactgttattgcgacattaattttcttaggttcacctcaagcacacgccagtgaacaactacaaaaagatggacaagtgattcaagcaaaagctagagaccaagaacaaacttcaaatgagacaagtaacaagcaagttcaatctaacacagaacctaaagcttcacctgtatctgagagtcaaaaaggaaacaatgaaactttaaataaagttcagactactgatacattaacaaatgatttaacatcattttcatctcaaaacgaaaataaagatacatctcatacaacaacagatttaaaagccaacaatgaagttcaacctcaaaaaaataaattagatgacataagtctagtcgaggtgaatgaaggacataatcatgacaaccgtaatcgtactcgttacgaagatagagaagcatcagatgatactctagtatcttcgacttcaacaacaattgatggtgataaacttcaagcagcgtatgaccattcttacgaggaatatcgaaaaattgatagagaacaagctgacactacaaaagttgctcaaattaaagcgacgttcaataaagttaatcatttctttagtgaaaataataattcaaatcaaacattaattaatgaattgtataaggaactagagcaagctaatgcattaattgaatcactgccacaacgacaagtaagaactattagtacaagagcaaatagagaagcacgtgctgtaagatcaagtagacgtcctgtacgtggacaaggtgggacgagaccccctagcaatactgctaatacttatacaccaccagtagttcataactctagaccaaaacctggctcaaaagtaaaaaagaattcagatttgtataataatgctaaaaaagaatggtatgtagaaaatgaaaatgatggttccggttattggtcaggaacgtttttacatgcaacgaataaaagtgcaccatattacgctacacgttctcattatcgaaatatgagtccatctagtgttagaggtattgcagaaatttcatcaattagacaaaatgatggttatttatggacgattaattttaataagtatcatattaaacgtaatggcatggtattttggtttggtttacctaaaggtcaaacgccaacgggaccagtacgttttactaccacagatgtaaatggtcatgaaacatcatcatctggtactggagacggtagagatcaagcattatcaagaatgtgggattctgctggtggtattacttctagtgcatataatttcagacaaggaaatcctttgaatagaagtgagttctataacgattcagttaatcatatttataatttaggggattttgcacgtggtaatgaaaatcaaccatttacattctttgaaagagaaggtgttccaaataaaattaaagtagctggagacgatatttatcgttatttaactgcgcaagtaaatcataatcaaggtattgatcatatctatgcatttcaagctagaggaacagatagttatatcattcaatttaaaacgtctggtagctcacaagatagattatattatgcagcaggtggtagagggattgaatttaatgaaatcaacaactataaccaattatatttagagccgctagaacagtataatgatcgtaaaactaaaattgtagatgttatcgatcgcgtactgcatattgaccatgttgaatcagcttatgatgtgccagagcgtagaataatgaaaaaacattacttagatggcgatttcgctacacacgaatatgctgaagatgttgcaagttatctaagtaaccctagtgatcatgtaatgggtttattccctagagtgcctactgatcgttatagaggtaattttggtgtaaatccgcttaactcttatgaaattcatgaaatgttttctgaagaaaaattaaaagaggctgcgagaacaggaagaccaattgaaatttttgttgggtttaatgtaagtgatgcatatcataatggtgaaacaatcaaaaaagtaaatttatttgtcaaaccaaagttagaacaatccattggattctattcagataatgcaaccgataataaagaaaattcacctgaatcacaagctgcacatcatgctgtctttttacaacaagaaggtcaaatgcttaatacagtgactaatggtaataataaggactatcatcaaaatattcgaattcaatttaaaagtaacgagtctgcaaatgtatgggaaatctctggatatccaccatctctacaaattgaagatgcagtagatagacccaatacagaacttgagaaaaataaagtattggttggtcaattaccgccaggacgccatgtgatgacagcgagaatcggtaatgaaactaaaatctttgaagtcattgccaaacccaatccaccagttatttcaacacttgcagcgcaattaggacaaaaaggaggtaagaaaccaactattacagtgacacatgtgccacaagatgagagagcaaaagtacgtttagtttcaggtggtatagacggtgcaggtcctggcacagcaccttcaggctatactgtactcgcggaaaagatggcaaacttagatggcacggtgacatttgaagaaagtgattatactaatcctttacctaataatggggttattagagcaattacatactatgaagattcagtacaatccaactttagtaattcgattaatgtaggattagatactacaccgccaacatttagcaacgtaagaggtcttcaagataaatactatcgtggagataacgctaatatttcaattcctgtttctgataatgcatatggctcaggtgtggaagatgcatctatcactggaaatagtggtttacaagcggtattcaatagagatgcttctggagacgcaggtactttagtgattacaggaacaatttcgaatgatgtaacgtggaatagtgatatacttgttcaacccgttgctcatgatagagcaggcaatactaccaatgtaagcccatatcatcttcatattggaaagttatcagatgataaaccagttcagttatttagccagcaagaattgaaaacagtgggtaatcctaatagtatttcgcaaagcgaaagaaatgatatcattaactcgcttaaagctaaaaatagtagtttgacatcatttttaagtacacttaacccgtatatggttggtaatgatggtagagtagtcttgacatttaaagatggttcgactcgtatcattgatccgactcaagtgattacatatagaccacaacgtaaatcaatatatactgaaccaggtagttcaaatacaaaagaagcatttattacaattgctaaaggtcaagagtatacaattggacctgatttaagaaaatatttctcattaagtaatggacaagatattcctaataatgcgtttacaactattaatggtagttcaataccatcacctcaagcaataagtcgtctaaatgctggtgtttatacttataacgtagatgcattaaatgcttacaaccatagttcagaacgtttgacaattaaagttaacgtagttgatgtcaatacattagcagaaaatcaacgtgtttatcgttcaacaactaaaaatttaagtaatgatgaaattacacaagttaaaaatgcctttaaagatgctaatccacaattaaatctaaatgatagtgatatcagaattgaaaacgatgaacctttaagtaatcatccaagtcgtgtaagagtgacgattactaaaggtgaattaacaaaacaattcatttcaacatttgatcatatggatttcttaaaatggataaatttacgtaatgattatactgtgacttggacaagtcaaaaacttaatggaagaagcacagatggtggatttgagtggtctccagatggtaaaacaataatttatcgttatgatgcaacgattggaagaagaataacaggcaatgacgtattatcacttttaagagcaacgcctaaacatgcagggttgagaaaccatatagaaggtcaagagaaaatattagcagaatcaggctcagctcgtggatttaaacctgtaggatattctaaagggaatagtatatattcggatggagaacatccatttacatatgatggtcaacctattcaagtactagacatagttgacagcaatactggatatagcaactctgccgttgcacgcagtgactatagacatacaagcagcaattcaacagtgatgagtggtgatattccagccatgaatggcgctgctggtttccatttagataaagtgcttaaacaaaatggtactgataatggaattatgggtgcggtagataaacaacaattgtatttaacgccttatggtgcaaaaagctatattgaacgccttggacaatcaatgtcatcaacagacaatgtgattaatatcgtatttgtaccaactgataaagtaacgccaaatattgtattagataattataatgatcatgttgtattttcaggagaaactttcagaaatacacttacattaactgataactttggtattaaaaatgttactgtacctaatgacagtcaaatacctatgaatgtattaaaccattcaacattaagtggtgttgcccctaatgtatctaccccaatgtctaaacaagtgaaagttaaagtaacagatggtagtgataacgaaacaacggctgtatttaatgtattaatcaaaccattaaaagataaatatagtgtcatgacaactgctgatgagtcacatccaatacgtatagcaaatattagtaacaatgcaagtttatctgagacagatagacaagctatttttaacagtttagatatttcgaaatcaattaccaatagaaattacgttacagagggcagtaatgaaataagaagtagggaaattagtaatgttcatcgttcaggtaataatgcaaatgttgaagtgactatcacttatgcagataattcaagaacatccattactgtaccagtaaaacatgtcattcctaatatcagaggaatagaattatttacagtacaaggtcagccattcccaagtggtaaaggaacaaataataatgacttcttcgttataaacaatgatcaacctttgacagatgctactgtgacttggattggtaatggaccagatattaactctacaacagtaggtgtcccacaaattttaagagcaaacatcttatttgatggtgaaacaacacccattgaaacagaagcacactatagagtagttaaagcgaaaccaaaaagagtatatcaaacaacaataaatggtaatttcttatctgcaaatgaaggctcgtcatctaatgtaggagcatttgtagaaggtattgcaaattatttaccatcgggtacgaacttcgattgggcacctggttctggacaacctttatcaaatagtccaggtatttttacagaaacaattaacgtgatatatcctaacggtcaagtagacccagttaatgtattgtttaaagtgaaaccaactacgccttcaatcgacactataagtacaaaatataaagctgatttatctggacaatctattaaagtaaataatgttccaaataatgcacatgttaaactatatactgaagatggtagagaaattagtaatacaactatgactagaaatcgtgatggttcagtatctattacaattccaggagtattaccacttggtaatattaaagctaaatcaattatcacggttgatcatttaaccattactgaacaaaataatagtgattctgttgtgaattcaacacgttcagaatcaatagaatcagatttaagtgcatcttcgcctgtaacaaaacagcttgaagcggtagacggcggattaaaatttgttaaaggggacaacattgatttaaataatcctagaacttacattaactctaattcagatatcatacgagtagaatgggaacagaatgctaatcaatggaaaaacacaattggtactacaactaaacgcgccattgtcacattgagtaatggagaaacgagaacagtttctattccagtaaccatttatgcaccagccactgctaaagcaccacaacgtgatgtggtcggtcacgcgttaacttatggcgatgacgcagcaaattatgtgacatttgaaaataattatatgaatggggctacagtgacttggaaaaataataatgctccaaataataatattgctggcgttcaaagcttaactgctgaagtaaggtataacggtattaatcacgtatataatgtcccagtaaaagtatatgaatataaatataaatttaaaaaatcagagtatagtacgattgtaggaacaagttttgaaggaaatggaaatattaataattatgtcgtattagaaaatgcgaatggtttacctacagatggtttccattttgtttggactcaaaacaccacagcttctcatagcgaacaatggtcaaatttagcatatccaaatcaagcttttaaaaaagaagcgagatttgaagtattagataaccaaaaccatgtattctttacttctgatccagcaatatttaaagtgacaaatgcagttccaaatccagcaactgttacacaaaatgatgttggcgatgtagtcatttcaccaggagtaggtaaaaatttaggagctaatgttggaaatataattgtaaatccagatagaattactgttaaaaaaggaaatcaagttattggcacatttatcaaaaataacacaggcaaatggacaaaagcgagtgattctataaacacgcctggtttatcagtttctccagatggcagtgaaattatttatgacaaaatgtcagttccaaatgatacattgattaacatcgaatcaacgacaggtaatggagaattgacaagtgaagctgctacaagtgcaacttataaagttaagccagcaacaccatctaacacaacatttgcatttaaacaaaatggtgagttcgaagttattccaaacaatgctaatgcatcaacaacaaaaaatcctacagataaagttaaaattagctatgtcgaaaaaatgggtaatagtacagaacaatctagagaattaattgtaactaaaaataatcaaaatcaatggtcgatgaataatcagctagattatgtaacacttgattctagaacaggtaaagtgacatttaaagctaattctttaaaaccacatgtactgattaatacagaatctattgctggaaatgatgataattttagccataatactgttggagttgtgggacctgatcatcatgatgttgtaattcatgagatagtcaaagaacctggcgaaagagttagtaatgaggaacttaataatgcaattagtgtagataataaagatcatgctaatgtaaacgaaggagtaagtttacctacaaatttacagagtgatacaacgcaagcagtaccaacacgtattacttatagagatggaagtatagagattgtaaatgtaccaattagaacccatgcagataaatcgagtattagaaatgctttacctaaacttaacgcacaaggagacactaatggtaaaacaccattaagtgtgactgcatataataatgaaatgcagcatttgcatgatgaaattgaagcagttcgaagaaaagctaatgaagtgttatcaaatgatagagcaacaaatacggatgttgtaaatgcgacaaatagtattaatgatatctcagtgaaaattcaacatgcaatttccttactacaaaataaagcggataatagtgctttagttgaagcaaaacgtcaacttgatgtagcaacagcagaacaagatccaacgtcaggaatgacacaagtaacatcagataattatagagcgaagaaagcagaagcagagcgaattagttcagaagctcaaggtgtgattaacaacggagatgcgacagctgaagaaatcagtgatgagaaagcaaaagtagaaaaagtattaacagcattaaatcaagcgaaagatgatttaagagcagataaaacagaattacaacataaacttccagaattagatcaacgtggcattaccgaaggttaaacaacataatttttatgaaacgttgatatataagcgtttatagactatttttgatttgtttatacataaaaaagggcagaataagggcatgatgtgaaaaaacttgattttaagcataaaaaaatacgctcaaaatttgaacgtatctaatttatattttccaacttactcatcatatctttatccatttgttcagtaacatgactatatatctgtaaagttgttttataatctttatggcctacacgatccattattgcacgcagtgacacgcctaattgtgataataaggatatgtgactgtgacgcatagtgtgagttgaaatatctttttcaatacctacattctttgcagcgttcttaatgttagcattgatagatgataaaggcataggactgcctttactatttgtaaatataaaatttctctctttaaaattactatcccacttagccgatttcttattttccaacattaccttacgcaatatctcacaacttctagtggtaatagatatagtacgataagaggactcagtcttagttgtatctttaaagccacgtacaccatctttagttatccatgctattgtgccatcaatctcaatctttttattcttaaaatcaatgttttcaggttggagtgctaacaactcaccaattcttaaaccgttcaatacttgaaactcagtgatgtatgcagtcatcatatatgagcgtttaatatagcctttattactagtgcttgccttatggttaagttcatcaatgagtttatgtacttcattcatttctagataattctcacgttttgctttgatttcttctctagttactgctttcttaggtaatgacacattatctatatatgatatatctgagatattgtactttttctgagcaaacttcaatacactctttataaggctcacattgactttaattgtaatgtgtttaatattattttctttcattgatgtatttatgtaatcttgaataacttgagcattcattttatcgacaagaatatcctcatttattcgctctttgatgtgagcaagtctgtaagtttttgctcttatagttgattgtttagcaccagatgttaatttgtaattctcaaaccactcatcacatgcagcatggaaagttagcgtcttgagtgtagtaggtgtcttattatttaacttttcttctatacgctcatttaaacgtttctgagcctctttctgtgactgcttaccattcttattaagcaccacgctaacacgtcgccatttgtttgtgagtggatctttatacttctcataatagcgatatttagtttcaccatgtttattagtaaatttctcatgccacatataatcacttccttttgtaataaaaaaagccagatgacgtatcatctgacttttcagcataaagctgagaatatgtcacctctttaatagaggtgatgccggagtggttaccgggaatttataaacaaatgataccatcttattaattctttatcaaacttttttatagaaacttgagtttaatttctttttgtattttatctatatcacgttgaggcaaagaaatttttccagtaggatcggaattatttattttgcttaaacgctttttactaatagtagaaatggctgaaacattagcataagtatctttgcctatatgttttgaatatactttaatagcagcatttagctctgataacttatttgagatttttttcttttgtttctcttcttccttattaaatttgtcagaatcagtttcaaaatttatctttaaatcgctatatttttctatgcaatttgcaaattgctccaataaatctgctgcagttaaatctaatatagtggttgataattttaagtaattagagttctttttagatgaaagtgggacaattgtaatagtttcttttcctctattatcataattgtcaataacaacacaaaagtggttgccagaaaattcacttcctatattactacctaatctagcatatacaatagcacctttcttataagccttgtaataccttttatgagtactattcacctcagaatgtaacgaattcgaataaaactctaaccaatgaggcatatacattatttttagattattgctattagaattagaatagctttgctttaatttattatttgagttgtttaatttgctatttgcttgatttatattttttgacatttattttctctctttcttattttgttgtgcatatttaagtgtgccccctaaataaaaagggtagacgtgctaccctaaatttttattgctgttattgattatccatttcattattcattacatcagatacacgatcattaaattcatattgtgaaatttggccactatctttttgttctactaaatcattcacttgttcttgtccagattcagacatccaatctgtttgaaaatcagtggcaggtaatgaatttaaatcaacatgattattttgtgaggcttgttgttgctcatcattccactcattttgatcgtttatccattgttcatgtgctctttgttcagcaggagttctataaacaccattatggtcataatcatatctttgttcattttgctgattgttattagcttgttgagtttgctgttgctcttgagttgcaggttcttgagattgaacttgttcatttgtagcagtctcttgtgtgtcttgttcttcagtagaattatcgttttgtgtagacttgttatcttcattctcttgagaattcttttcttctttagactttttatcttctttagttttcttatcttttttatcgtcagctgtcttttcagtagtgctttctgattttttattttcattttccttagtgtcatcttgactacaagcacctaaaataagtgtagctgcaaataatgttcctagtaattttttcatatatatgctccctaattttattaccttttatattcatttttctatggtgtattagacactgttcgatagaaccaccaccttaatgatgaattaatacttaataaaacttttataccacatgtgagtgtgtttcttaaaactttatttaatcacctttggtaatatttattaattcttcaacaacattatcaaaaaagtcttttaaatcttttcgataattatctttatatttagtcattaagtatgaatggattatatttaaaataatttctttatcttcttgagatataacattgtaatctatgtctttataattttcgttagtgactatatttctgggacctaatattgcgaaatctttttgagacaagtaccattctagatcaaaaattggtttatcttttaaatttttgattagtacatcttcactattagttaaatgaaaagatccatctttttttagcataattttgtttgcgtatattaacccactaatttcacgtatttgtttagcaacttcattggttgttttattaagatattctaaaaaatcaataacaaatttttcatactcttcattttcagtagaatttaaatccttatagcttttttgttcaaataaataagaagttataaagtcattgaacattttctcttgttttcttcggtcatcagtttgtaaataaagagcttttaaaaatttaatagctatttttttagatggttttttagaaggattgttttgaattctacttatatatgtcggagaaacatctgctagctctcctaatttgttaactgataattttaattcttctctgtatttatttaatacttcaccaaactccatagtatttttctccttaatagtatagatataactatattttaactataaaagtttatatgtacaatgaatttatcaaaaaattcatgttgacagttataaatattaagtgtaagctatatttgtacatatgaaatatataaaaatataaaaatacatatgtacaaaggagggtaatatatgaacaacaatttaagtatgctaatgggcagagatagagtaagtgctttgaaattaagcaaagaaactggaatttcaagaactactattcatggtttatatcatgaaagaactaaaagcccagatatgaaaattgtcatgaagttgtgtgactatttcaaagttacacctaatgagttttttggaattaaagaaaaagaggaggcttaggatatgccacatgtaaaattgcgagatttaccaactaaagaaaatacagcacttgaagaaaaacaaatcgtattcccagtgaaatacgcaaagcctaaattattaagtgagttatttaattgtagttattcaacaattcgtagattactcatttcatatgatgaggacaatctaggcgtagaaagtatgtatcttgatattagcagcacacttacattagtgaatgtagaaaagtttgaagaatttttgaaatgtaaacacaaaaaatatttataaataaaaggagttttttaaatgaaaacattaagtaaagaacaaactaaaaatattatgtatcaattatatgcagatcgcataggctcaaaagagaatttaacttttgatgaaagatttaacagagatagagcaataatcaaagtattttttgaacgttgtggcatggaaccagaagaaaatgatgaattagctggttctttagcactaatgtacagacgtgtatttaaaacatatggagatgctagaaatctattagatgctatggatgaagatatgcaaaacttagcaaaattctctcgtgaagatgatttgaatgatttatttctattacaaaaaagtatcaatgaattaatcgaaaaaattaaagagcaacatgaagattatattatcttttataaataagctggtgatgataatgatgaaattcctaattaaattattactcatctcattaatttcattccttagtggttggctattaggaatacatgtagctttcgctatttacatgttaggtagtgtgattgcagcattaaatattgaaaaaaatggaggagtagtaaatgaacattaataaaaaattaaacacaacaaataatttcagagaggaaaatgaaaaaatgaacaatttaagtaatcaagattttaaaaatattgaaaatgaagtgaaacgcgatctaatttttaaagacaaaaagcatattaaaaaaatgacgaaactattacaaaaacgtcgtaacaaagatattacaattattaaaaaaatgtacccttatttaaataataatgagattttagaaatcactaatgattatcaagaatacaaaaatcttgttcaagctactgaaacttttacagattttcctatcatttatggagattctaatattagtaaattcttaactaaagacgatattgaagatttaaaaatggctgttgaagaaatgacaatttttgttgaaagtttggaggaataataaatgcttaaagagttaaaacaaattaaagagagttttgaaatagcagatatttctaataagatccaagcagtcattgactatgtatgtgatgaacaagaagggcttgaagatttaagagattattatagagaaagtaatcaagtagtaggagaaaaacagactaatgacaatatgaaatcaaatttcattattgtatcaacattattatcagttattcgcgactatgaaagtgaattgaatgatattgatacagttataaaaagaacgtcatctgatgtgaatagtttggcgactaaatcagataacgcataaattaaaatatttattaaatacaagagcaataagaaaatactccatttgtattataacatctttgctcttgttttaatacatggaggtataaaattgagcgtaattcaattagaaaatgatactcaagtgagtgtggtgtggtatggaaacgaaaaatcaacttcattcaaaaacttctctcaacctaagtggagtgaattaattagtcgtttatccattccacaaaataatggaaataagtacgctagagggacagcagtttatggtgatgttgctgatggtgtagataataaagataatgaatatcgaaaatatagaaatgatgacaatgtactttatagagatgtacttgtacttgattatgatgatgaagataatttgaacatgctacacaagtcaattaaaagcgaattagaaggctttgcatggttttggcatacaacattcagacacacaaatggaagcccaagaatacgcttgtacgtgccactgagtgagcgtataagtgcaaatgaatatcgtgcatatgtaagaacattagcacaaaaaattgcgtgcaaaattgatgagggcagttatcaaccatctagggctatggcgttaccagtcagaaaaagtaatgaaagtccttttgaatttcaatttaacgatgctgcaattttagataaatcaacacttaaagagtgggctaaattatttgatatttctactcaagaaaattctactcaaaactttaaaagacgtgacgcaagtcattgggaagaaaaagcatttggtgttagtgagggaggacgcaattcgtcgctagcaagtattttaggacacttatttaatcgtagagtaaatgaacatattatttatgcctttgctcagatgtgggggcaatcatgcacaccaccaatgaatgatcgtgagataaacgctactttttattcaattatgaaaaaacactataacaactagagaggagttttctatgaactttactaatgatgaaattatgaacgaaattaaagagaatatgaataaaaagacatatactcctaattttattccagatggttacaaagtgaaacctaatagttatggtgcagcactttatcaaattatcccaagtagaaaagatggtgaaccagataaagaaatgttcatcactactactattccagaaattaatactagatatgaaaatattgaaaatggtgaagtgagttataacatgcacttttttgataatagaacaccagtaaatttaaatgttactgccgaagaaatcactgataatagacaactccttaagctagcaaataggaaactagatgtaacttcaaatacttcatcaaaattagttgattatatcaatcaatctaagagatatagtccacctttcaatataaaggtagcaactcgattaggacatgtaaaagattactttatttatccttacaaagatgaaatggaacataaaaatatcaagttttttaataacgataaaggctttcaaaaactagtaaattcatttaaatctaaagggacaatcgaagattattcaaaaaaagtatttataaaaattaaagatttacctatggttatggtgatgttatatgcctcattaggttcggtattactttatgaatttgatattatgccatttattgttgaacttgctggaagtacttcaacaggtaaaacattcactttaaatctagtagctagtgtgtggggtactactgacctcacaactacatggagttctactagaaacagcattgaggctatggctgcatttttgaactcttttccaatgtttaaagatgatacacgtaatatatcacctaattttatagctaatgcagtctataactattcaagtggtgaaagtaaaagtcgaagtaataagaatttaactattgatgaaaagaaagaatggaaaaatatcatgctttctactggtgaggcctcaattacgaatatggcagatgataaagctggagtatcggctcgtgttgttactttagaagaacagccttatccagataattatgatttcatctcgttagatcatgaatttagagaaaattatgggacactaggaattgaattctttaaacaatatcaatcaaaaaaagatgaatataaagaaagttttgaaagctatttaagatactttaatgaaaaaggtatcaatggagtaatgcaacgtattgggaagtgctttgccttattacagcttactggtgaaattcttaatgatattgatggctttgaacatgactactacaagattattaaccaagcatatgaaaatatgttgaagaataataaaacgatagataaacctaaacaaatgcttgaggatatgctgcaatatttagacgctcaccgaaataatataactggagacggatatagtcacgtgaaaaatggggagattaaagcagtatataaacgtggttacttatgtattttaggcgatacagtgaaagatatattaggccatgaaatgcatactataacaaaacaatgggataaaaaaggttatttagttaaaaatgaaaaagaccgtctacaaatgaaaattagtcattcaaatattaaacatagaggttttgctataaagaatgaaatagttaaagaactagggttcgacttttcaagttcaaactatccttattcagattattaataagttcccaatagttcccgttgagtacccattcaaaagatacaaacgggaactcaataaatactatattatcaggctttaagtctaatagttcccgaagttcccacttatatataaatagtatatgtaattaaaaaaacaactagagtaattaattataaaatacagaacaataaaaaataattaacggggacaacgggaactaagtttattaaaactatatacatcaagggtttgaacagttcccaataaaaaatagatatggggacttaacggggaatagttcccagaaatttaatatggaggttaagtatgccaacaattacagaaataggacaccaacaatttaagatgtttataaataataataaatttcagcagcatgtgaagaaagaacaagaaaacatggctaaaggtttgattataagccttttaactaattctactaaaactcataaaatctttattcaagaagttattttattaaacaaaaaatattatctctattgttttggtggggatatatcattgataactaaagatttcaaagcactaataaagtttaatattagaaagcctaatccgttacttagtcaatattttaatagtgattggatcattgaaatagataacttaaattcacttaaaaaaggacatggaaaaatgctaataaaagatatattggcaatttctacaaaacttaatcttgaggcttgcttatggactgagaacgataaaaatacaaaatattttgaaagatataattttaaaagtatcggtaaagttggaaaagctaacgaaaatttgatgattaaaagaaaggaacgtgtatagtatgaataataaacaattaaaagaattaactaagattgctcattttatggaaagtgtaatttatgaaacatataattgcgtaagagattttaatatacttacgcagcaacaagtgaataagacaacatttttagagttcgcactcatgttctttgagcgtaaaacgtgggaaattgttgaaacgttggaatttgatactaatgaatttatcttattgaatgaagtgaacgaaacattagatagtgtaatgaaagaaacagaaagcgtatatcagtatagcgtgactgatgagaatggtgaacattatcatactactgatagaaaaggccatatcattggaatattagagtgggcgttaaatcaaattgttgggaatatagatattgaacaaacaatttaatgtataaatttataggtcatgcactttaacaggtgcatggcttttttatatgtaaatcgtaattgttaagatttgttaatgattttagattgagttaaggtaataaacgaacattagttctgtgatagaaagtgtatgaaattgtatgaaaagtagtataaatactttgtttgtagtgttaaatggaatgttaagaagttatataaacgttacaaaaataagaacatacgtttgtaatttgagtgtaaatttagtataatagtgttatagaagtaattatacttttatataatttgattagttttcttgttctctgaaattacgaatacaatagttaaaaaatgcaaattcactagattttcatttattacctcctcatttaattaggtctgctcaaaataactaaaaaatgaggtattaaataatgacaataacaattgaaaaagaattaactcaagatcatattaaagtattaaatgtattacgcaacactaagcacaatattattactaaacaaaatatattcaatcaactgaatatggagtttactaagaacaatgaaagatggctgcaacatactattaatagtttagttgtagattatggctatccaatcggatatagctataagaaagatactaggggctatttctggataaagtcgaaagaacaaaaggaattagccttactaagtattaagcgtcatattgagggtagtatgaaacgatatgaggcactaaagaaaactgagatttaaggtgatgtagtgagtgcagcgattgaaattattcaagagaaagttagcgattacgaattgttcactagatttaatacttactacattcaattaagaatagcactcatagaaagtgatatagaagatatgtatgaccgaactacacctagtttatgtagtgatactgtatcagaaagtatttactatgagagttattccgttgaaaatctagcaatcgctatattagaagaacgtcagaaattggaacggtataagagtagaagtcaaagagatttaaacgccttttatactgttctagggcgtttctctactaaagaacaaaagtatattaaaaactatattaatacacgctcagaggctcatatgaatgtgatagagcgttttaagattgaactatacaaatatattcaaacaaatagaaatgaacgtaataaaggtatagaaaacaattattcatatataaatgacaagcgtcaaaaagtaaagacttatcctcataagttgacgcttaaccaagagaaagcactcagagaaaaagaagatggtgctactgaaaagaacatgaataatgatgagtttgtagcaaagttgaatgatctagataagaaatcatttaaagaatttatttataacagaaatgaaaataatatcgactttgagaaagtcttgatattgctacaagctataccgaaacgattaccacaaaaagagattaaaaagccatataactacataagagaaataggcttaaaaactaattgaaacgaggaatttaattgaaaactgcaaaatattttgatgaatacaacgaatatgtcataggtcaaagagagagtatcgataaacttgaaaaggaacgtcaggaacttatacaacaaattaaagaagataaagctaaatataaagaactaatcgctaacttacaagataatgaagctgatgaactctatactacatttgatagtaatgagaagaaattaaaagcattagagaaacgcttatcaactaaaaaagaagtatttgatgaggctagacgtaaaaaggcgattgaactcattaaacatcaaaaagaagtgccacaattatataaaaaagataaagagaaattattagctaaattctatccaatcatggaagaatataacaatctcttaaaagaggttgatgatttaaacgctaagtatgaaaatgagtatttacgttatgctaatccatattataatgaaaacttcaacgaagatgatgaagtaaaaagggaattgcgaaatcactttagagatattttatacagtccatttattaaaggaatagaactaccaaaaacagataagtataatcacaaacttaaatttattagaggtgttagataatggctagaaaacacaatttagataaagtatcaaatcatattatgttagaaacaaatttatcagagaaagatcgtgataaattattagatgtcgttgaggctcaaattaatcaaaacaatgatgagcaacgtagaaaagaagcgaaacaacaatctaaaagttcaaaatcacttatacaaatggctagagaaaatcgcattatcaaaggttaatatcatacacgcctatccttagcgataggctcattttatttgtgaggtgcatacatgaaccttaaaagagtaaactactcactaacctatcatgaaactaaaatatctgaatacactttactaactgagtacaacccaaagtttatcaataccaagattaaagctattactacacaaatagagatgatgtatcacttaaatatctcacatatgactacaaatgatgttcatggcgttgtatcaatatcctatccactagaaaagttagtgattgatattataggtgaaaaagaaaaattgaaacgtttcaaaacaaaatcgaatagaaacatgcagcaattaaaacaagtcattaaatcatatacacctagtgaacaaaaggaaattatgtattacatgcaatctaatggttcaacgatagattatagcctcatagaacgcctacaacgtgatttatacgcttataagcataaagtaagtgttgctacatgatatacgataaacaagtgattaaacagtttataatggactatcacaaaaagaatgtgtcaaaggttgaaagctatgatgatactaatgtagatgatttcttttcactgagtgatgaagtcgaaccctttgcattaaatgagaatactggtaatcaagtattctttaatgaactagatcaacttatttatgcagtaggaactagaagagaatactacatatttttcttactatgtgaagggaaatcaatgaatgaaatcgcaaagatattcaatttaagtagagaaagaatacgtcaactattgaatggtttattagataaattataggagggataacatgagtgatttaaaccctagacaagaaaagtttatatctgaatacctaaagacgttgaatgtaacacaaagtgcaattaaggctggttatagtcctcatactgcaagtgtacaaggtagtagattgctaaagaatgagaaagtggctaagtacattgatgaacaacgtaagaaagtgattgatgagggcgtactatcagctaacgaactacttcatatcctaagtaatgcagcagtaggtgacgagagcgaagtgagagagatcgttgttaagcgtggggagtttcaacgcaacccagacactgacaaaatgaacttagtgtacaatgagcatgtagaaatggtggaagtacctattaagcctagtgaccgtttacgtgctagagatatgttaggtaagtatcataagttatttactgataagaaagagttatctacggacacaccaatttttattaatataggtgagtggccagaagatgaggaagaagaaaaacgtaaagcactagatgaaatacacgaacaacaccctaatagaacaatgattattaatgatattccagatgaggactgataagcatgaggtagaaattactacatcgatattcattgatgatgtgcatgaagaagattaaaaaatgattatgaaaatagtacttgctcaattttgagtaggtgctttttattaagtttttgattaaccaaaactattgctcaaaaagaatataagcattttttgttagtaaataattaaggtattggtattttgtagtaccctttattttgtatatttagttttaattaaggaattagtttgttagtatcaaatttaaagatatctaggagggaatataaatggggtcagttctcactgttgctttaatattcttaattttagctctagtctttaaatctcttaagaaaaagaagtaagtaagatatacatatttgagtagtaatatttttatttataaaaagtaagcgttttttatttacatttagagccttttataagataataaatacagctactgaaattactactcaaaatcgagtatcctttaaaatgactgtatcctttgggtgcagtctttttgtttataacttgtcaaaactttacatttcataaagttacaaaaagacttaaaagtccacctgtaagcagtaccttaaaatagggaagtggtttgataagacagtaaaggacgcctcaaattaaggctaccttagaaagctgatacgttaagttgccgtattagaaaaaacaaaagcgagcttattaatcaataaaaagctaacgcactaagttagtgcattagaaaaccgaaatgtcggttatctaatgctgaaaagccgtttgtggcttttctgtgtagtcaaaatggcaacgcagctatttcttaattaaatggcgatttatatagattatctacgtacctaaattgagtacgcagcttatataatgatctagtagtgagtttcattccccaaatttggggagtgagaatgtaaaaaaattatagatactgtaaaaattgtagacaatgaataaatttaatgcgtataataacattagaagttgttcccttatgaagcacttctatattatatttttctatatgtgagtcattttttcttggctatgtccattgggcatagctttttattttattgtagacaaatatataaataatgagataatagcaaaagaggtttaagacctctaacttctttacgtacatatagagtttttactctatctcaactacaatggggctaaccttaattggttagcttctttttttgcgtaaaaaagcactctcaacttagctcatgacggactaagtgagagtgtagatgaaaagtaaggagtgaaacgtttttattactttattacatacaaattaataatttttattataatagtgtggctaaataaaaattagtgtgtaataataacaattgagattgtctaactggcgacttttcctttccattaagtatttcttctccatcgaaaatactgtatgtttaggcaatctcgacactttaaaagctttcataaatagcataactctttaggggcgtaaagcccctttttgtatgcgaaaaagtctcactagtacatgactagtaagactaagtttcaataaaagtaatgttaactacgaattattttaacatatatccacttcacttaatagacatacattttattatacactgccgtaaccattcgtgacggtagctgcatgaacaattcgttcagtcatgtataaaaaggaattgggaaacacgacgcccaaagtaacttgatctaagaaatgaacaaaatatgtatccatgtaattgtaacttgtaaatgttatataagtgaatgtagctacaccagtatttattgatagtattggtcaagacgatgagaagaatgagagagatttagaaaagttgagtaaacaatatcctaattaaacattttaaaatgatgatatagggagatttgaagaatggtaacagattagttctattgactaccctgttttttttatgtgtacaagataataactaaaaggtatactaaatttaatgattcattagaatatttaaatataattatacgttattaatatataattaaataatatttgaaagagaaaaaaggagggggtaaatattttaaaaatatggaatatatgtatagttattttaacaatggcactaattatattattagttgtacttagtatttgctatcatttacttgaatatttaggaaatgttataccattgattttgttacttataaacttgattattattcacatatcattaaaaactcataagaagaaatatgaattttggtttttaacattctttccatttatgtttgtattaatattactttctctattatttgatattcctctatctatattaatagcaattacaggtaatgtttatcagccttttttttggtttaataatatatcaataatttttatcttgggtattatcattttaatccttgttaattggaattttatctgtaagaatattattaaaaatgatgatagatacatacaattatataaagatttatattcaatacttactctggttaccacattagtagtggcaataataaatcttggatttgataaaggagatcagttgggcgctttaaaagaattcaatataatatctattccactggttggatatttgatttgttcaatattggaatttataaataagcattctttaacaattagagatataaaaaaatataaactacgctgagaaatgtcctgtgttgcagtgggattgagttagtgtaactatgtagcttaactgcaagtatgactgttaaatatttaatgattactatacattaattggattaacatatgggtgaacaaatcgttcactcctttttttatgaggtagcgaaatgggatgtaatgatatagctgattgaacggaaatgttaactgtgactatatttatatttagaaatatgacaaatagcgacttaaataagcattcataatcatttgttattacatacttacacggtgattaaaaaagggcataaaaagggcatatttatgaaacaaagggcaaaggtatgaatatagattttaactttataaggttataaacattgattttacagtgttttgaatgagtgagaaatatactgatttattatggtgatttcgaaggtaaaaaaccagcgagtgtgactgcatacaataatgaaatgattaaaatccatgatgaactggaagcagcaaaaacagaagcagatagagtgattcatgatgacaatgcgacaccagcccaagtgacagcagctatcgcaaaaatagatgcggtacaacctaagttagacaatgccattagtttacttcacgacaaagaaaataacagtggattagtggaagcgaaacgccaacttgatgaagcaacggcagaacaagatccaacaccaggaatgacagaagtaactgcgaataattataaagctaagaaagtagaggcagaacaagtaagcagagatgcacaaaaagtgattgaaaatgacaatgcaacatctggggaaattgcgcaagcaatagctaaagtaaatgaagctacagttgcattaaaacaagctaaacatgatttagttccagacaaaactttattgaataatgctaaaaacaatttagaaacaagcattaatcaggtgcctgaaactaaaaatatgactagtgattctgttgaaaattatagaaataaattaagccaagcaaaagatacattagctaatgcacaaaaagttattgataacccaacttcaacagttgatgaaattaataaaactatcgaaaatgtgaaacgtgctaaagatgaacttgaacaagctaaacatgacttaatattagattatgatgctattattaaaaaaattaaacaacaaactgatttaacagatgctcaaaaggataaattaatagaaaagacaaaagcttctacaacttctgatgaattagaaaatattaaacataatactgatttattaaatgatgcgatgaaacaattaaaagaaaacatcgctgaaaaagataaagtcaaagcaagtattaattatactgatggagataaagataaaaaagatacctatgatgatgctctaaaagaagctgaaaaactaattaatgatgcaaaaaatcctattattgatcctagcgtgataaatcaacttaaagataagataattgatgctaaaaataatttaaatggtgtagaaaaattacaaaatgctataaataatgttaaacacatattggaaagcttaaaacatttgaacaatgcgcaaaaagatgcgtttaacaatatgatagataatgaaaattcacgtgataatttagatataattattaataaagctaaggaagtggataaagctatgaaacatttaattgatgaaatagctgataatttagatatcaagcattctgttaattattcagaagcttcaccagataaaaaatccgcttacgatgaacttattaaaaaagctgaagacttaataaataaaggtattggcacaaatgcatcacttgaagaaattaataaattaattcaagatattaaaaaagcaaaatatgatttagatggaaaacatcaagttgaattagctaaacaaaaagctttagaagagttagaaaatgaagttaaccgattgaaagatgaaattgacaacaatcctaacctttctaaagaagataaagaaaaacttaaatctaaattagagcgtcttcttgaaaatgcaaaaggtcagattaataatgcaactacattaacagaccttaataagattaaagataatactcaaaaagaaatcgataaattaaaagcattaattgatgctaaaactttggctaaacaagaaattattgattttgctaataaaaaacatcaagaaattctaaataattctaacttaactgatgctcagaaacaaaaagtggtagctgaaatagataaagctttacaaaaagcgcttgaaaacattgataacgccaatgacatcaatgaaattaaccgtaaacttaaagagggcaaagataatatagcgaaaattgttgcaaaagaaattactaatgcgttaatagataataaaattaaagaaattaaagcacgcaaagatttaacagatgaacaaaaagctaaattaattgattatcttgaaaaacttagacgtgatacgttaaaagaaattgataaatcacatattgatgatatcggttcaattatccaacaattaatggacaaattgaatatgcttgatattgataaaattgaaaacatcttaagtcataacaataaaaacaataatcaaaatcaatcaaatgttgacggtattcaatctaataacagtcatttatctaaatcacatagattacctgatactggttcagaaagtacatctattcaattagagattgaattaatgacactattagttggtctaggattagtattaaaaaatcgtagaaaaaaacaaaaaaataacaagaataaaagataaaaaagatataacttagtatctttaaaaataaagagcaggaaaccactataaactgggtttcttgctcttttttattaaataaatatgaactatgcttcaaaatctataataattcttccagcgttctcatgattaagtactgtctcaatagaatgttttaaatctttaaaagcaattgtatttttaatttcatgtaatttattagattttaaatcagttgctaatcttctccatacacgttgacgtaatttcattggtgtcataactgaatcaagtccaacgacgcttacaccacgaagaataaatggaaatactgaagtttcaaagtggttacctccagtcataccaattaatgcaacaccaccaccatttgttagatgctttgctatataaggtgttccaggaccaccgcaaggatcaatagcagcttgccaagttctttttcctaatatttcattactatcttcagaaatacgatcgataacttctcttgctcctaattcttttaatttattcgtagcttttttatttccagtacttgctacaactttataaccaagttcatttaacatcattacagctaaagacccaacaccaccagaagcgccacgtacaagtactttatcgccttcaagtgtcataaagttagctttttctaatttttctattgctaaaccagctgtgtaaccagcagtcccataaatcatcgcttcttcaagtgttagattttcaggacatttaacaatccaatctgatttaacacgggcatactcactaaatcccccgtaatgattgacacctaaatcatagccagtaataataacttcttcacctttttcgattgtaggatcatcagattctacaactgtacctgctaaatcaattccaggaaccattggatatgatttaagtacaccgctatctttaacagtggctaaggcatctttataattaataccagaatattgaacttttattaaaacttcaccttcaggtaaatcattgattgataaatctttgaaatcacttgtgacagtgccatcattatctttttcaaccataaacgctttgaaatttacactcataaaatcgtactccttaaaaataaaaaattagatgttaattgcatatcctaaataaccataccacattttaaacgagtcattaagttaaaaagtttatataaattaaatataaaatagtctatattttgataaaaaaataattatattgacagtaaaacagcataaatatataattttactgataatgattatcacttgataataatcatgttgatagagatacaaaactgtaattttaaaatttagatgtagagaatatacattttaaaatatttaacatcaaaagataatcactaaattttaatgaggtgaatttattatgaagaaattaccaactattttactaacatcatcactactattaacagcttgtggtcataataatcacgataatgctaatgagaaaacttcaaaaaaatctacaaatgagaataaagtagcattacagaaagcagctaaagaatatagaaaatatacaaatgaacagttagatcagtttttaaaaggaactgaagaatttgtatctgcaataaaagcagatgatattgaaaaagcaaaatctttgtatcctaaagtacgcatgtattatgaacgttctgaacccgtagctgaagcatttggcgatttagatcctaaaatcgatgcccgcctagctgatatgaaagaagagaaaaaagaagataagtggacagggtatcataaaattgaaaaatctctttatcaagaaaataaaatagataaaatgactaagaaggatgctgatcaattactaaaagatgctaaagaattagatgctaaagtagatacattagatattacacctaagttaatgctacaaggatcagtggatttattaaatgaagtatctacatcaaaaattactggagaagaagagatatactctcacaccgatttatatgattttaaagcaaatatcgaaggtgctcaaaaaatttatgaattatttaaatctgaattagaaaagaaagacaaaaaattgagttctacaattatggataattttaataaagtgaatcaattacttgataaatataaaaataatgatggttataaagattatagtgcagtaactaaagaagatagaaaagcgttatcagatgcagttaactcactaggagaaccattaagtaaaatggctgtggttacagaatgagtaatataaatcataaaaatcaccctcaaatgactagacgttcatttttaaagttactaggtataggaagtgctggtgctgttattggagcaagtagtgtaggcagtatcttttcgtttaaatctatgtttgatactcctgaaagtgaagaaaacgattcatatgaattttatggacatattcaagctggtattactacaccaactcaaaaaaattgtaatttcattgcattagatttaaagtccaaagatcaaacattaattaaagatatgtttaaaaaatggactcaaatgtctgttagtatgactgacggtgctattattggggaaaatagtaacaatacactattaccacctgtagatactggtgaatcaataggattagatgctagcaaactcactttaacatatggcgtgagtaagtcttttttgaaaaaaataggattatcatctaaaattccatttgattttagagatatacctcattttcctaatgatcaattagatgaagagtatagtgatggagatattatgattcaagcttgttcaaatgatcctcaagttacttttcatgccatacataacttaatacgaccttttagagacatcattaaaattcgctggtcacaacatggttttatttctactaaaaaaaatgaaacaccgagaaatttgatggcatttaaagatggtacagttaatccacgaaacaataacgacttgaaaaaatatgtattcattgataatggatgggcagaaaatgggacgtattgcgttataagacgaatccaaattcatattgagacatgggatcgtactgcattagaagagcaagaagcaacatttggtcgtaaacgttctacaggtgcccctctaacaggtaagaaagaattcgataatattgatttaaaggcaaaaaataataagggtaagtatgttatcgatgagaatgcgcatacgcgtttagctcgtgaagtaaaaacttctattaaacgtagagcatataattataatgatggtacaaatgctaaaacaggtgacttagatactggactcatgtttatttgtttccaaaaatctattcaacagtttatcgatattcaaaataatttaggacacaatgataaattaaacgaatatatcacacatcgaggttctgcatcatttcttgtattaccagggatacaaaagggaggctatatcggtgaaacactatttagttaagatatcgatagttactctcttaatcattattacacgtttgttttcattgacttcagttagtgttgcaaatgatagtcaattaaatgatgcgtatgtagctatctctgatgcgaaatggacattagagcacaaacaattaaattataacgaaaaacaaaacgtgttgaatgaagtaaaacataaaataatgtctttaaatattaaaggaaataaaaaaggaaaagatgttaaatcgaaacttcatatgattgatcaagcaacgactacaaataaacaaatcgactcgttatcagaattaacaaaatctctcatcgtttacgaaagttctgtatcgactgatgatattgataaagatattagaaatttaaaaaaacaaattaacgcaaaagataatatcattcaagaagctgtaaaaaataaagatagatcaaaattacagtctattaataatatgttaaatcaaatttggaaaaaacatgaaacggccatcagaaattatgatgaaaataaatatggacaaatagaagtgtacttgatgcagttgcgtgtagctattcaaaaagaaccattagacataaaaaaagtagataatgcttggaagacatttaaaacaagtattgatactgttgataaaaagcaatcaaatactgaaaaaaatcaatataaagttacccaacttaatattgaattagagaaagcaatcaaaggtatcgagagtcatcagttaaaacaatcagatgaggcactgactaaatttatacaaatatggccttatgttgaaggcaaaattcaaactaaaaacagtagtttatatacaaaaattgaagataaaattccatattatcaaagtattttagatagtagtaataaagatcgtattaaagaaagtttaataaaaataaattctgaaattaaagatactgtaagtgaagacgcatattcatccatagatgtaatgattatatttttacgtgaaggattagaagtattattaatcatattgacattaacaactatgaccagaaaggttagagacactaaagggacaacaagtgtcattggtggcgctatattaggtttgattttaagtctcgcattagcatttatctttattcaagtactaggaaataatggattattacgtgaaggtatggaagcagcgctaggaataatagcagttgttttaatgtatattgtgggtatatggatgcatagacgttcaagtgctaagcgatggaatgatatgattcaacaaatgtatcaccatgcaataagtaatcgaaacttagcattattaggtacaattggattaatatccgttttgagagaaggcgttgaagtcattatcttttatatgggaatgatgggaagtataaaaactttagattttgttataggaattatactagccattgttatattaatcatatttacattgttattcaaaacagttatacgattgatacctatatattttatttttagagtactttctattttaatatttattatggcatttaaaatgttaggaattagtattcaaaaattacaattacttggaatgataacacaacatagtattgagcatattccaacacttaatatcattggtttttatccaagtattgaaacgatgagtgcacaattaatttatatactattaattgcttatttcactttaaaacatactaaaacaaagcatcatatctaaattgaaaataaagtctcaaacgagtagattaatttactcgtttgagacttttgcatttgattcgaattcattaatgtcgagtagttattttagttaaaagaatgcttatttcaaataaaataatgagtggtaaagtcaaaaatagattcaaagtgatatctggtggtgcaagaatactagcaataatgaaacaagtaaaataaatatatttgcgatattggtgtaattgtttaatatctattacatccattttaactagtcccatacaaaacataggtaattgaaagacgacaccaaatataaataaccaccttattaattcatgtaaataagcattaaaaccaatcactggttgaatatacattgttttcgataatgttaatgaaaattttataattaatggaaatccgatagtataggcgaaaccgacaccaatgataaataacgcagtacataataaactatatttataaataaaaaaacgttcacgttgatgaagccctggtgatataaatgcccataattgatagaaaataataggaagaactaagcacaaagttacaaaactaatgattagtatatagatttgaatcatttcagtgaatgaaaaagtatgtaaaacaacttgagtgcgtttaatatggtaaacaaaagttgtgatccaccatttagatgatatgtatactaacggcaaagtaattaaaaatgaaataagtatattaattaaacgtcgccttaattcttcaaagtgttcgagtaaggtcgaactagtttgatttgtctcgctgttgtttagaatgtttactgggtgtttcctccacctcatctgaatcaatgtgttcagctgcagacttaaattctcttaaagtactgccaatcgctttaccaaattgtggtaattttttaggaccaaaaataattaatgcaacaatactaataatgactaaactggtaggtccagccatgcctaatataaataactcatgaaacatcttaaacacctcactttaatatagtctatctttactttatacttattgataattattatcaatacatattttaatttataaaaaaataatttaatatagtgtttgaaatgtgtttgataaggaataagatattatctggttttgagaaaaataagtacaataaaaagaggggaaatatgaaagaagaaattgaagaaattaaaaaagataatgtaagtgagttaagaaaaattgcagaaaaaacgttttatgatacttttaaaggtagttatactgatgaaaactttaaaaaattttttaaagaaaactataatgaaacgaagttattatcagaaatcgaacatcaccaatcatttcactatttctataaggtagatgatgagattgctggttatttaaaattaaatattaatgaaacacaaactgaaccaaaaggtgatcaatatttagaaattcaacgcatttattttgataaggattaccaaggtggaggaagaggaagtcaatttattcaattagctattgataaagcaagggagtataataaatcaaaaatatggttaggtgtttgggaaaataatccttctgccattgacttttataaaaagcaaggatttgaaattacaggacaccatgactttattaatggtaatgtaatagacatggatttaattatggaaaaagaaatttaaaataacacaataaagcactaagaggacagaaaagttctgtcctcttagtgctttattatttatctaaaatatctctcataagttgagttagtttttttagagattgattattacgatttataagtgcatgtcggtgaatggtaggaatcgtatcatgtattaaatgatttagtaacacttcttcgtctgtgtaccaaacttttgctagactgttcagcacatcaatatagacgccacgttcttctttatattctttgtgattaggagtatataaacaaacttttttatcaatagttaaggcatcaaaaatgatagaagaataatcagtaagtacaatgtctgatattaagattaagtcttgtgtttcgatatctataggagcctcaatgacaccttctggaatagcatcatcaccttcaatatgccccttatatatcacatagtatttttctagtaactctggtgtcatcgttaaaggtgtaaatgattctgtatttttatgccatgttggcgcatataataaaacaggttttgtatgattaagttttaatttttcacgtatttttctttgctgattttgattatctttatagtttagtaaataacttactcttggataaccaaaaggaagaaattgaaccgtttcattaggaaaagcagtctcaaataaaccttctgaagcttttgaatctaataagacatatgattggtgtttccatttattatattttcttgctctgtaattataaatattttgattttgatagggttctttactatctaaaaataattctttaataggcgtaccatgccataattgaatgactgtaccattaggttgatacgcttcaggcatataactttcaatgactacaatttttgcagtttcaataagttctttattatgttctgcatcaatgggaaggaaatatggtccatgtctatcgtctgtaatgtaataagcttctgttgttggatttcgttttacaaagtaattaaaaaggtatttagagttacctctatagccataatcgaatcctaaaaatacgacatgatttttcaatttggatgtatctttagtatagatataacttagttttttatgattttgaatcgcacgttgatgaattttattgtacatccatttaggcaatttaaattttgttgttacaagccagctatcagcaaaacgaagagtttcgtcagctaatggatgcttatatttaggaaatggaatcgaatggccgtggatataagctagtttatttaaatcaaagtgattggcaattttaatttctcttgtatctaacgaattccaaaatgaactagatgtctgtaattcctcaataaaatcaaaaacaacatgtccatctatatcaacctcattttttaaaatagtgatgactgctaggtccataatagattgaatttgatattttgagaggtaaatcagcgcagtatcaatattataaatgatatttggataatgattaatattattcatccaagcgagaaaacttaatttatcattcccaaaataacgacaatcattaagataaacaccatggattgtgtaatcaaccgcaatagaatgttcacctaatgagacagcattaagcatgtcttgattaatttttatttcgttagaataggggataaaatgtgaataccctgcagatttagctttattaagttgtatatctagatgtgacatattagatatatttatttgtttaatcattatgcattatcctttaactcctaaatttcatatttttattttaccatgcacttttaaaaaattcatatttacatgaatgataatataaaatcatatgtttatgaaaattcaaatagatcttactactattgttgacataaattatttttacagtattgtcaattgtgataagaaatgttatattatttttgtgaaaatattcacaaaaataaaaagtgtaatattctaattttaacttgattacaatatgttaatttttgtgaatacctgttaaaattagaaaagtgaatttttagttgtttagctagataattcatcaatataataaaatattaaggaaagaagcgtttaaactatgttagtacattcttttaacccttttggtaacttagcgttatctagtttaattgcagcaattccaatcattttattcttgttatgtttaactgtgtttaaaatgaaagggatttatgcagcaatcactactttagtagttactttacttattgcattgccattctttaaattacctggtggtattgctacaggtggtgtaatagaaggattctatcaaggtattatcccaattggttatatcgttattatggccgttttattatataaaacgactcaagaatctggtcaatttagtacaattcaagatagcattatgagcatttcacaagaccaacgtattcaattattattaattggttttgcttttaatggcttcttagaaggtgctgcaggtttcggtgtgccaattgcaatttgtgcattattacttgcacaactaggttttaaacctttacaagcagcaatgttatgtttaattgccaacgctgcttcaggtgcattcggtgcaattggtattccagttggtattgtgaatacacttcatttaccaggacatgttgaagcaatgagcgtgtctcaagtgtctacacttactttagcaattattaactttattattccattcttattaatctttattattgatggttttaaaggtattaaggaaacattaccacaaattttagtagcttcaattacttatacagtattacaaggcttaattacagtatttgttggtccagaattagctgacatcattccaccattagtgactatgggtgtgttagcagtattctctaaaaaattccaacctaaaaatatttttagaatacaaaaagatgttaaaccagaagcagttactccacatagtggtaaagaaattttatatgcatggagcccattcattatcttaactgtaattgtaatgatttggagtgcaacattcttcaaaaacttatttgcaccaaatggtcctttatcagcattagtatttaatttcaatttaccaggcacatacagtgatgttacacacaaaccaattatgttaacttttaactttattggtcaaactggtactgccattttactaacaattattattacagttttaatgtctaaaaaagttagctttggtgatgcaggacgtttatttgttgaagcattcaaagaactatggttaccaattttaacaatttgcttcatcttagcaatttctaaaatcactacatatggtggtttaagtgctgcaatgggtcaaggtatcgcaaaagcaggcggcgtgttcccaatcttatctccaatcttaggatggatcggtgtgtttatgacaggttcagtagtaaacaacaactcattatttgcaccaatccaagcttctgtagcacaacaaattggtacaagtgcaccattacttgttgcagctaatactgttggtggggttgcagctaaattgatttcaccacaatctattgcaattgcaacagcagctgtaaaacaagtgggtaaagaatcagaattacttaaaatgactctgaaatatagtattggactacttatctttatctgtatttggacatttatcttatctatatttatgtagatatcattaaaaggattgcaactcggagaattccgattgcaatccttttttatttgaaaatagaataaaaataatcgtaaattttatctggagaataatgttcaagagtttgatgactcgatttaatcatattttctgaatgcgttctcttttgaatagcaagattaatatattttgctaatgattgtgcattcgcatagtctgctaaataaccatttttattatgttgaatcagttgtgaaggtccaagtgtatctttaaaactaataacaatattgtcttgagccattgcttctaatatgaccattccaaacccttcatttcgtgaaggaacgacagtcattcggctttgtgccaatttttcattaaggtgttgagtggctggatgtatggttattaagtcattaagctggtaatgattaatagtttcttgtaaattttgatgttcttgaccttcaccataaatctcgattttatagtttttctgtctaagcgtatctttaatgagttggacactttcgattaaaatatcataacctttttcatattctagacgtccggcacttaaaataatattttttttaggtagatttaattttttagttcgaataatattaggaacgacatatacaggtgtttcaatgaatgattcataatggtttttatcagtatgagttaaagtggttagcgcgtctagatgttgataagcatctaatatttcttgtcgatacgctttgggataggcatttaaattcatatgttccatacctattgtcattgcatgtccatgataatatttagaaataaatatattaaaacttgctcttgtacctatgagtacatcggtatctatatcattaattgcacgtatcagtttatgttcaatatacttggagaattgatttaaaccaggctcatgttttgaaaggtagataggctttaataaaggagtgtatttattcaatcgattcataaagatagaaatcacattttgtggttttaatctataatcaactaaggactttattttaatagaagaattaagtttgaagtaaggcatatctttagctctaaaaatagagataatttcaacgttatgacctttgtccgctaaggtatttgctaattcagtaattgctttaactgtgccacctaaggcgtatatattatgcattaaaaaagtaaatgatttcatgattgtacctcgttattaataatattataaaaattatagcatgtaataaaccaactgtataaatgttgtaagctttataataaaattaaaatatttttgaaaatagagataaaataatgtgataattcgtgtaaatacttttttcaaagagaaattatgtatataattactatagtaattaaaattttatttacgcttttaacgtcaaattaatatttatttttttatcgataaaagaaagcgttttaaattaaaaatggtcgtgtttatttcgactgaagatgtgattataaaagggggactgggttgttatgagtatagaacatagcaaaacagatgtcatcttaatcggtggcggaataatgagcgcaacattaggaacattactaaaagatttatctccagaaaaagaaattaaaattttcgaaaaattggaacaatcaggtgaggagagttctaatgtatggaataatgctggaacaggacattcagctctatgtgaattgaattatacaaaagaaaataaagatggcagtattgatgtaacaaaagcaattaaaattaatgaacagttccaagtatctaaacaattttgggcttatctagttagaactggtcaactagaacatccaggtaattttattcaatctgtgccacatatgagctttgttaaaggtattttaaacgtagactttttgaaaaaacgtgtaaaagctttaaaagaaaatattttatttcaaaaaatggaaatcacagaagatcgagataaaattgttgaatgggtgccgttaatggtagaaggtagaacatcacccgttcctattgcattatctcgggatgaaactggtacagatgtaaactttggagcactcactaaaaaattaatttctaatttaaaagaacataaagtagatgttacgtatcatcaagaagttcaaaatattgaaagattaaataatggttattggaaagtgactgtcaaagatttgaagtctaatacaattcacacgtttgaatctgagtttgtgttcattggtgctggaggagcaagtcttccacttctacaaaaaactggaattaagcagtctaaacatgtaggtggtttcccagtaagtggtcttttcttacgttgtaaaaacaaagacgttattgaacgtcattatgcaaaagtatatggtaaagcagatgttggagcaccgccgatgtctgtaccacatttagatacacgatttgtaaatggagaacgatctctattatttggaccgtttgcaggcttctcacctaaatttttgaaaacaggatccaatttagatttaattcgttctgttaaaccgaataatattgtgacgatgttaacagcaggagttaaagagtttaatttaactaaatacttagtttttcaattaatgcttagtcataaagatcgaatgaatgatttaagaatctttttaccgaatgctagagacgaagattgggaagttgttattgctggacaacgtgttcaagtgattaaagatacagaagatagtaaaggaaatttacaatttggtacagaggtcattacttctgatgatggatcacttgcagcattattaggtgcttctccaggagcttcaacagctgtcgatatcatgctagatgtattaaaacgctgttacaaaaatgaatttgatgcttggattccaaaaattaaagagatgatcccatcatacggacttaaacttaatgagcacgaagaagtttataacgcagtaaataaagaagtaagaaaatatttaaatgtgaaataatcgaaaaaacaggtagtgtcatttttaacactgcctgttttttcgattaagttaaaataggatatgcggaaatagaattttaaatgtcgtgccatttttagaatcactagatacacatattttaccgtgatgtaaatcaatgatggacttagtaattgctagtcctaaaccattactattatcactagcattgagtttataaaaacgatcaaatagatgtggtatcgcttgtttagaaatagtttgtccttcatttgtgaccgcaaacataatatgattattttcttgattcaaagtaatatcgataatgccatttatatctgaatatttaatagcattttgaattagattcgaaaatgcttgatgtaaaaggcgacgatttccctgaaaatatattttatgcatatcagataataacatcaatgatttatcatcaatcgtgtattgttcatgtcgaatgatatcagtaatgagtgaagataattctaaattatcgtcaacagataagtgattcgcattatctaattcagatagtaatagtagttcttttattaagttactaagacgtgtaatttctaaatgaatatcattgattaagctatgacgttcatcttctgaatgcgcaaattgtaattcagttaatagtctttcaatatgtgtaagaggtgttttaatttcatgtgaaacattttgaacaaaatgttgacgcatgtcatctaattgttttaatgactgacgcatggtatcaaaacgaaactgtaaagttccaatttcatcatgacgggtatgagaaatgggtgtttcaaaattcccattcattaattgttcggtcgccatttttaactttttaataggtttaatgattgagtatgttgaagcaataacaagtgaaatagatatcagcaataagaaaataagtaataccaataaaaatattctaaactcgccgaatgttttacctatatctggtcgcataaatactgctataggttcatggtcttcataaaatcttatgcctacagtgttatcagtttcattatcaaagaaacctgtcacgaataattcaaaaggtttgttttttataccgtgataatcatgaccacgcataacttggttaatagatgatgaggacagtgtatcttttctaaaaggttcaccataaaatgttttttgtccttgtttatcgacggtaacgatttgataattcatttgtcctaaatgttgaaaataagattttacgtattttgaaggaagttgatgttcataagtacgagcttcttttaacgtacgcataattttagtgtcattattttctttgagattgaaatgataatgtatatttgcaatgaaaaaactaactaatgcactaaaaataatcacagtaatagtataaattgcaatgcgactatatagtgttttaaacatctttattcaccttgtatccctggcctcttactgtttgaatttcaatagttgcctctaatttttttaaccgtgttcttaaacgcttaatatgaacgtctactgttctttcatcgcctgtataatcgaaaccccaaattttttcaataatagactctcttgtgtaaatttgtcttggatgagtgcataataaaaataggagttggaattctttagtaggaagattcatttttttagatgctacactcacctccataaattcatcatttaaaatgacatttcctatttcaatcttattttgcgtattaatttgataacgacgcaaaacggcacgaattctaaataataattccttaatttcaaaaggtttagttacatagtcatctgtgccactgacaaatgcacgttctttatcacttaatgcatctcgtgctgttagcataataactggtaattgatagcgatcttttaataattgacataattcaaatccatccatacctgtcatcataatatctacaactgcgatatccacgcgatgatgattaagatattttaatgcttgttctccactcgaatgtgtcacggtttttatatgatccgcttctaaatgtttagaaacgtaatgcaagagttttggatcatcatctacaattaaacattttatcatttacttttcgctccttttctaattattatacgaatctttaaaatctaagacaattttctttgttgttcatattcagttcatatttactctctatactgtttaataaagataaatagggaggaaaaagaaatgaatttagcttggaaagaaataaaattttataagtttcgatatatattaattatgctaatcatcttcttactagggagtatggtattatttattaatggtttagctcaaggtttagcgagagaaaatgtgtcatttttaaataatcaaaatgcacaaacatatattattgaaaaaatgaaagaacctaaaattgaaaaatcacaacttgattcaaatcaacaaaataagatagaagatattataaatcaacaagcaacacatcttggaccacaaacattaaaattaaaacaacaagatcaagatattcttacgttctctacttctaaagaagatcgtccctctttaaaagaaggtcgctatcctaatcattcatatgaagttgcaataaatgataaattaacgggacaagatgtaaaaaaaggagatatgattaagtttaaaggtcataaagaagcttataaagtaagtggtattattgaagatacaatgtattctcatagctcaatggttatgatgaatcattcagattttaaagcacttaataaaaattattctacattctacccagttaaagaattaagtaaaaaagataaaaatagaattaatgatatttctaatgtaacaactgttagtgaaaaaacattgactgataacattgcaagttaccaagcagaacaaatgccattgaatttaatgataattagtttgttcgtgattacagcaattgtattaagtgcatttttttatgttatgaccattcaaaaaatctcacaaataggtatattaaaagcagtaggtattaaaacgagacatttattaagctcattaattatagagattattttaactaccatggttggtgttattttagccacagtacttattttaatattaagtttaattatgccagttacgatgccattttatttaggttacggtacaattttattaatgattgttatttttcttattgtaggatttatcggtgccttactatcatttatcaaagtagtaaaagtggatccaattgatgctattggaggtatggaataatgacattaaaactcgaacatattagtaaaacatttggagaaggttcagcgaagacaaaagtattaaaagatattaatttagaagttcaaccaggagagtttattattttaaatggtgcatcaggttcaggtaaatcgacattattaaatatattaggtgggttgttaacacctactgatggtaagatattatatgaaggtcatgacttatattcaaattataaaaatagtacagaattaagacttaatgatattggttttatttttcaagcgtcacatcttgtgccttatctaacggttgaagaacaactcactgttattgctaaggaagcgggagtaaataaaaaagaagccgtttcaaatgctaaatatttattaacagaaattggtctcaaagatcgtttgaatgcatttccacatatgttatcaggaggagaaaagcaacgtgtagcaattatgcgtgcctttacaaataatcctaaaatcattcttgcagatgaaccaacagcaagcttagatgcgagtcgtgctacgaaagtagtagagatgattagggaacgtataaaatctgaacaaatggtaggtattatgattacacatgacgagcgattatttgactatgctgatcgcgttgtaaaattagaagacggcaaaatacttaattaaaaagtgaatagtattcatactatggaaaagtctggatcatataagaaaatgatccagactttttgtatattaaagtaatatccaaattgacgctataaatactccgactaaatacaaagtcaaaagtaatttatattgatatataagtgcaagaaaatctcgtaagagcgctttatctagaaaatgataaggcgttgaacttcctaatcctattatttttatatttaacttttgtgcaaaacgtaaggctcttaaaatatgaaattgactcgtcacgcataaaatactagggacattttcaaacgatgtattaatgaaagatttagaatataaaaagttctcatatgtactgcttgattgtgattccatcaatattgaagaagatgatacaccacatttaatgagataattcttcattgctaaggcctctgaaattggttcgtcaggaccttgaccaccacttaccaatatattgcaattatgcgactgtactttatagatttctaaagctctatccagtctagaggctagcataggagtgactgtttcattgaatatacctgcgccaagtataagaatcatatcatattgtttatgggttttagcacgttcaaatgcagaagaaaaaattaaatatataatgaaagcgtaacaagcactaaataaaattaaagcaatccataaaaacatgccatttaaaataggtaatggtattgtactaagatatataaatataccaataaataagacaccatttattaatctacgaaacattttatttaagaaacgggttccttttttaattttgaatagatgagaatgtttgacaagcaaaccgatggtagaaatgataattaatataaacaatccagttggtagggtcatggtcatgatattaatgagactaatggtgaaacataatatcacgcttgtaataaaaaaagaaagagagataaagtgtcttatattaaacaaaacacttaggataataattaaaacaataaataataaaatgattgctagcatatttgataacctcatatctatttatatatttaaatgtaatgaaagggtcacaatttagcaactattatatttttctatttgttttcaacgtggaaaattattgatattatttaacagagtataaaaattaactgcacaatatatgaaattatttaagtaaggagatttgtaatgagtagaatctcaaaaaatcatattgaatttatgaaacatttcatagatgaaacaaatacattaacgtctaaacttttaaaagatcaacaagtaaaatatggtgtttctactgaacaatcgaatgtactacgattactcagtcatcatcaagctttatctataacggaaattactgaaaaacaaggggttaataaagcggcagtaagtcgtcgtataaaaaaattaatagaaagtgactttgttgcattacagaagcctaacaataaaatagatcaacgcttaaagtatattgttttaacagagaaagggcgccaatatacggaagaaaataacgaaattataagtcaaattgtgaatgatatggttaaagacttatctagtaaggatatagaaaaagctctgagtgtgctttatattatagatgaacgtgtgaagcattttaatgctaaggtaaaataaacgttaatcggaaattatctccacaagaaaaaagagttataatatttgtgtgaaaaatataaatgacattgcatcttatgagaggaagttgatgacaaaatgaaacaatgtccttattgtggacaagaattaaataaaagtgataggcaatgttctaattgcggaaatatgatacctaaagaaaaaaataaagcaacatcgtcctctcaatcagaacaatctaatttaaaatttaaaaagtttattccttgggtcattataactttcattattattttaattggtattgttttcatactattaaaaaatttcaattctcccgaagctcaaaccaaaattcttgtaaacgcaattgataacaacgatgctcaaaaagtagctacgttaattagtactaaagatgttcctgtagatgatgaagaagcaagtgtttatattcaatatattaaagatgaagttggaatgatgaaatttattcatgatgtcaaacacacaacagataaattaaataaaagtaatcatgattctgcctatatacaaacaaaaacagataaaaatgtattaaaaattagtaaaaatggaacgcgttttttaatctttaataatatgagttatagaccacctacaaaaactgttattgttaagccgaaaatagatacaaaatatgaatttaaagctggtggaaaacgtagagtcattcatgcaaaggcgaatcaagcaacttctattggtaaatacatttcaggtgtttatgctatcgatgctgaaaaagacacagaatatggtcattttacaggtcaaatgaaatttgattttagatatgctaaaggaaatactgtggaggttaatgagaactttaacgaagcttcacttaaagttaaattaaagggtaaaagtgacttagataaaaatacattgaaagtaactattaatgataaagaaatgaaatatgatgcatcaaaaatatatggtccatatcctcaaaataaagacattagtgtttcagctacaggtatggttaaagacaaaacatttacgtctacaagtaaaacaataaaagcaaaagatttaggaaacattaatagtgcaatactagattttgatgaagataaaatttctgattatgtttcaaagaaaactgaagaagaaaacatacttagagttacgttagaaccattttttaatcaatatacctatgcgctaaattatgctattaatcaacaaaattttgagataataagtccatttctaaaaaataagtctgatgcatatatagatataaaaaatcatttaagtgattcaaagcattttgaattctcacagttgttaagcgcaactcaaagtggagatattattaaagctaaagtacaacaaattaatcaacgcggagaaatagaatatgtcacttatgaaatagaagaagataaagataatggaatattacaaatcataaacattaaatagattctaaggagaatatttaaatggaacaaagacataaccaagataagcattccttgttatttattattattctaggtatgttgactgctataggaccgttagcgattgatatgttcttacctggtttacctgaattgaaaaatgattttaacactacgacagctaatgctcaattgacactatcgttttttatgattggtcttggaattggtaatttatttgtaggaccgatttccgatagtgtggggcgtaagaaacctttaattatcgttatgaccatttttactcttgcaagtctcggaatcatatttgttcataacatatggcttatgattatcttaagacttttacaaggtattaccgggggaggcgcggcagttatttcaagagccattgcaagtgatttatataaaggtaatgaattaactaaatttctatctttattaatgttagttaatggtgttgcaccggttattgcgcctgcgcttggaggtatcattttaagtgtagcagtttggagagtcgtatttgttatattaactatcttcggtatattaatgataatgggaagcctaacaaaaataccagaatctttaagtttagagtatagagatagcagtggtatcaaagtgatatttcagaattttaaaagcttattaggtacaccacgatttgtactacccatgctaatacaaggtgtttcatttattttattgtttagttatatttctgcttcaccgtttttagttcaaaaaatttatggtgtatccccactgcattttagttggatgtttgctggaataggaataacattaatcatctctagtcaattaacaggaaaactagtagattatattcatacgcaaacacttttaaggttattgacatgtatccaaattattggtgtatgtattgtttcgttaacgctcatccaacatggaccattcatttttttagtgattggttttataacattagtagctccagttacaggtgtagctactttagggttttctattgcgatggaggaaagtaccactggtaatggtagtgcttcgagtttattagggcttgtgcaatttttatttggaggtattgttacacctttggtaaatgtaaaaggggaatataacagtacaccttatctaacaatcattattagtgcaattgtgatccttattattttacatcttattaattttaaagtgtttaaaacaaaaagataaataaatagggaacaaaacagaatttaatttgattctgtcttgctctcttctttattatctttgtaacttaattgtattggataataaagaatttgctacttctttaggactttcttggcaaccgcttcttagccagtaaagaattactccaatttgaccgctaattgtataagaaataaaaagctctctattttgaattaaagtttcattttcagttaaaatcttatcgtaatatttcttggtaatatctaagtagtccataactaaacttctatttggatttgagataaaaatagcgtgaaaaaaagatttctttctatatatatatttgagaataatatggaagaacttaaatactttttcaggctctttttttatattgtgaaaattattagaaagtgcttttaataatttttcatacttatttaaatggtaactttggattgtagacaataagtcgtatttatcctgaaaattatcataaaaggttgaacgattaattttacattttgcacatatcattttaattgaaatttgttcgaaaggataatcttctagcaaatcgatcatacttattataattttatatttcgcttttaatttcatgtatgtcacctaaattaaaaagaataaccgacaattttttaagttttgttggtgttttttttattgatatgtctttataatatataaagtgatttttaaaagcaaataggaggaaagttcaatgaagaaaatggtgttaatcaatatcattactatcgttgctttagttattatcggagtagttggattttatttctatcataatgcaactagctatgtaacaactgataacgctaaagttgacggcaatcaaattaaaattgcgagtccagcatctggacaaattaaatcttttgacgcaaaacaaggcgataaattgaaaaaaggtgacacagtggcagaagtaactgctcaaggtcaagatggtcaaactcaagatcaaaaaattaaaatgccacaagatggtacaattgctaaaactgatggaatggaaggctctatcgctcaagcaggttcaccaattgcttatgcatataatttagatgatttatacattacagctaatatcgatgaaaatgatttaagcagcattgaaaaaggcgataaagttgatgtaacaatcgacggtcaagattctaaaatcgatggtaaaattaaagaaatcggaaaagcaactgcaaatagtttctcattaatgccatcatcaaacagtgacggtaactatactaaagtttcacaagtgattcctgtgaaaatttctttagattcacaaccatctaaaaatgttgttcctggaatgaacgctgaagttaaaatccataaagactaaggaggtcataaaatgacagtgaccttcattattggatatatcgttgcagcggtcattttagttggtttaattaatttattcgtgttgaaatcacgtaataaatctaagttaaatcaatcaaagggacaacaagtaaatgaagaatctaagagtcaaaataatccatctaaatttaaaatgagtgacttagaacaaaataacgatgcaaagaatgcatcatcttctcagatcagtgaagagaaaaaacgttactttaataatgatcaatctcattataaggaagataacgatatcaataatgataaaagaaaaaatcattttgaagaagaacaagagcaacaagattcatcttcagaacaaattcatcctgagcaaaagcaaacttcatattccttacactactcagacgatgaacaacacaatgctcatgctgaagatacagtaaaccataatgatagagatgttaataatcaacatctttccaaagattctatttatgaacctattaatcctgattcccaagaaggacgtgtgaacgaacgtataaaaaaccaaacacaagattttgtcttcggtgcagggattacaagaggtaaaattttagctgctatgttgtttggtatgtttatcgcaattttaaaccaaacattacttaatgtagctttacctagaattaatacagagttcaatatttctgcttcaactgggcaatggttgatgacaggcttcatgttagtaaacggtattttaataccaataagtgcgtttttatttaataagtattcatatcgtaagctatttttaatagcgcttttattatttacaatcggctcattagtttgtggtatttcaactaacttcccaattatgatgggaggacgtgttttacaagcaattggtgcaggtatattaatgccattaggatctaatgtaattgttactattttcccacctgaaaaacgtggtgtggcaatgggaacaatgggtattgcaatgattcttgctccagcgattggaccaacattatctggttacatcgtccaaaattatcattggaatgttatgttctatatgatgtttatcttaggattacttgctttcttatttggattagcatggttcaaaatttatcaaaaaacaatcaatcccaaagcagattatcgtggtatcgtatatagtacaattggatttggtgctttattatatggctttagtgaagctggtaataaaggatggggttcaactgaaatcattataatgtttataattggtgttgtgttcatcatcttatttgctattcgtgaattaacaatgaaagcaccaatgcttaatttagaagtgctaaaatcaccaacatacacgcttactactattataaatatggtagtaatgatgagtttatttggaggtatgattttattaccattatatcttcaaaatttacgtggtttctcagcattagattctggtttactattattaccaggttcattattaatgggtgtattaggacctgttgctggtaaattacttgatactattggtcttaaaccacttgctttattcggtattgcagtgatgacttacggaacatatgaattaacaaaactgaatatggatacttcttatcttcatattatgagtatttatgtaatacgttcactaggtatggcatttgttatgatgccgttaatgactgcagctatcaatgccttaccacctcgcttaatttctcatggtaatgcgttcttaaatacgatgagacaattagctggttcaattggtactgcaattcttgttactgtaatgacaactcaatctacaaatcatcttaatgcatttgcaactgaattagataaaactaatccagtcattcaagatcatgtacgtgaaatggcagcgcaatatggaggtcaacaaggcgcattacaagttatcttgacttatgtaaataaattagcctcaattgaaggtatcaatgatgcgttttggattgctacagcattaagtgtcttagcattcattttaagtttattcttaaaaggtaaaaaaggtgctgaagctgaacatgagagattgatgagtaaagaaagtaataaattttaataaataaaaaaggtattggacatataaaacgttcaatacctttttttattttattaaatataaaatgagattacatttctatttgattctaggatgacgatttctaaagaaaaagcttataaataataacgctaaactacttgaaagtaagatcagtgcattgtgaatagcatctgcttcagtaataatttgatttggtggtaaatctaagaaaaagtgatgcaagttctgagagatttgctttcctaacatttgaattgtataactaaaggaaaaagcaatcattaacgcaacagcgataatgatgaaattaatcacttttaaaatcgttctattaaatacaatggttaaaattgaaataatcatgctgccaatacataaaacgaaaaatatattaaaggctagaataaatttatcgattacaccttgtaagttagcgacttcactaatattaatattgagtggtccaatctgagtagttgtattttgaaaatttttaatctcagagaaatcaatcgcttgatttgcaagaacaaaatttagaataggttgtttatacatgctataacaagtaatccctacaagtataagaatgatgatatgtataattaaacttatccacgaatttttctttttaccataataagcttgttggttaacacgagcatatggggggcggtttgtttgatatctattaggattttgcattattattactcctttgccgtcattcatttgttttctatagttgactcatttatactgaatttaatgtgtaataggcaattatatgaactagattgctcatttttaatcatataaatagtattatatcgtttttttagctgtctgtaataaagtttgattaattttacaaatttataaggtaggtaaaatgttatgaaaacacgtatggtaaatagaattgttaataaatatttactacataatcgctcaattcagtttaagagtaaagacgagttcgaatcgtttatggagcgtagaaaggatattaatagagcgaaacataagcaacctcccactttaaatgtgaaagcaaatcttgataaattatctttaggagatatgcaagtgtttagatttaattttcgtcacgaaactaaaaagaaaattttgtatattcatggtggatacaacacattacaaccttctccattccattggagattaatggacaaacttgcacttaacactttatatgaggtcgttttaccgatatatcctaaagcaccagagtttcatcttaaagatacatttaaagcaattaataatgtatatgaatcgttattaagtgaagttaataatgaaaacattgttattatgggtgatggaactggtggagcacttgcactgagttatgtacaacaattagtagaaaatggcaaaacgttaccatataaaatatgtttaatttctccgatgcttgatgcaacaatgacaaatcctcaaattactgaaaatttggttgaaaaagatcgttttgttaatattcaaggacttcaaaatataatgaatgtgtggagcgataaagaaccattatcaaatcctttaatttctccgatatatggaataaaacaaggattgccaccaattataatgtttggtggtggtaaggaaatttattatccagatatgcaacgtttggcatatgaattggaaacttataatcaatctatacaattttttgagtatccaaaaatgtttcatgactttgcgttattcccaattcatgaatctcataaggtgattaaacaaattaataaggcaattcatgaataatgataaggactaaagtagaattgagttagattttactttagtcctatattttttatattgaatatttattgatttgcaataataattcactaataatatcatgctgacctttacaatgataataagtatcgagagattgtgccaaccttaagttttcttcgggttcataagttgtagtatgtaattctattacatttaaaagttgttgttcaacatcttgagaatatctttttagattagctattaaatcattttcatccgtagtcgttttaatttctctatctaatgtttctatcgcttgtttttgtccttggtaaaaactgatattaaatgttcgttgaatgagctcttgacttggtccattcataaataatgaacgattttcatttaattcaattaaatgtagtttaagtgtatcactaagatcaaataatgtgttttctaagatttcagaaatagtctctgtcattatgcctctcctttttttggaatgccgatttgatgtcctaatgatttaggccagcgctgatcatattgagaatcatagtatatttggatattagatttatagtgtgtggggaaagaagcaggtcggcgtgttaaacgattaatacccatcatcattatttcgcttgttgcagctaaagtttcatcatttttaaataattctaaaaagaagtgaacacgtttttcatcataatcataaatacgaacacgaactgaaaacgattcttcgaagtgtaattcctttaaataggttgtatgttcttcgactgtaaacgttgtataattaagcgcttctctttcttttaatgataaaccattataatgattaaattcactaataacttcactgaaaattgaattatattctgcatcgtgcatatgttggttaaaatcaacttgagaagataatacgcttttatgaataataaatggatagttcataatattttatcctttctttgaaattttataaaaatactttactaacacaaaataacacatacacaatatttaattcatggtagaatgataaccgtatggttaaataggaggaaacagaaagatgaccatgacaattcgatatcaaactaagaacgaaccactaactcaagttgaacagatcagtgatgtgcctaatgatgctactattgtgtggttggattttgaagaggcaacatccgaagaaaatgattttttgattgaaaactataattttaactatttagaattagaagatgctattaaaggggtaccacgagttaaatataaatcttatgatgattaccaatacatggtatttcatagtatgcataaagataattttactcctatagcattgaacgtatttctagacggaaaaacattaattacttatcatcaacatcattttgaatcgttaatggaagttgtcaagatgaatgctcgtaaacatgatccagatttagattgtgctgatatcgttatacatatccttgatatgatggtagataaatattttgattttgtttataccattgaagatgaggtatacagctttgaagatgcgcatgtagatgatacacatagtaaaaaagtaatggataatgtctttcaattacgttctaatcttataaaaataaaacgtgtattattcccaatgcaagaacttgtgaatacaattaagactgaaggtaacttaattgtagattataaacattcaatgtatattcaacatattgatgatcatattattaaacaaaataatattattagaacctctcaagaaatgacaaatgaaattcgagaaaattttgaatcttattcttcgtttagaatgaatagtattatgcaagtattgacactcgtgtcagttatattttctcctttaacatttatagtaggcgtatatggaatgaactttgaatatatgccagagttaaaatggcactatggttattttatttgtttaactataatgttactcatttcaattgcattaattctcttttttaaaaagaaaaagtggttttaatatagaacatagtttaaggaaagtaggttgttacatgagagatatccaaagagagcaaagaaaaaatgaacatgtagaaattgcaatggcacaacaagatgtccctcaatcagattttgaccgtatgaggtttgtacatcattcaattccaaatatcaatgtgaatcaagtggatttaacgagtcatacttcaaattttgatatgacatttcccttgtacattaatgcaatgacaggtggaagtgattggactaagacaattaatgaaaagttagcagtcgttgctagagaaacaggcttagctatggctgtaggatctacgcatgcagctttaagaaatcctaagatggctgaatcattcagcattgtacgtaaaacaaaccctgaaggcattatatttagtaatgtaggggcagatgtaccagtagataaagctgttaaagcagttgaattattagacgcacaagctttacaagtacatgtgaatgcaccacaagaattagtgatgccagaagggaatagagaattctcgacatggttagaaaatgtggaagcaattgttcaacgcgtaagtgtacctgttatcattaaagaagtaggatttggcatgagtaaagaattactacaatctttagtaaatataggcgtaacgtatgtagatgtgagtggaaagggtggcactaattttgtcacaatagaaaatgagcgtcgttcaaataaagacatggattacctttcaaattggggccaatcgactgtagaatcattacttgaaagtataagttatcaaaataaactaaatgtatttgcaagtggtggattacgaacacctttagatgcaattaaaagtttagctttaggtgcaaaagctgttggcatgtcacgtccatttttaaatcaagttgaacatgctggtattactagtaccattgaatatgtagaatcatttatagaccatatgaaatctattatgacaatgctagatgctaaagatattaatgatttaaaacaaagtaaaattgtttttgatagtaagttaatgtcttggatagagcaaagacatttaaaagttgaacgtggataatattaatcgcttttgaagaaggacgaccttttcaaaagcgattttttattgaatgaggtgttacttccatgtttcttctggtaatagacaatcggattttctcattctagagacatatggatttcctttaacagtatatcttaagtgtttttctgtccattcacctttatttgggatacctatacgtgcactttcttcaatctctctaggaaattttctattctttacatcaatagataaacaacattgattaattgttgaaccatctattgctctaggaatactaaatgctttagtccactttcccggaccatttgtaagttcgaaaccagatttatttcggttgattttcataccttcgataccatcttcaggttcaactgcacgtattaagacaccttctgggataccttcttcacgtgttactaaattaataagtaaatgcgtatgcataacatggccatatatggttccgccacgttcatataaagaagtgactttaggcgtttgtttcccaccaaatccatgtgctgctttatctttaaaacctaaataagcttctgtttcgacgatatagccactataagtttgtgtatgatcttgataactaattttaacgcctaataaagatttagccgtttcaattgttggtttatttacaaagtccaatataaatacctctttctttaaatgaatcatttggatgcttgtctaaactttttaataattttattatagtggaaaatgatagagttagaaaatattaaatgcattgatagagaatcaaaaaacatctaatagataacgtttacatttttaaatttatataaaacctatggaatattaattaaaaaagtgtaacaatatgtattgatgataaagtcaaagtttaaaagtaatagatgaaatttaaagcagtttgctacaatgaaactaacttttcaaaagttggtgaataaacaaatgatatattcaatttttatttttgtattatcaggtctctgtgaaattggtggaggctatctaatttggttgtggttaagggaagggcaatcaagttggttaggatgtattggtggactagtacttgtcttatatggtgtgattgctacatttcaagtgtttccaacctttggacgtgtctatgcagcatatggtggagtgtttattataatgagtatcatatggtcatttgtatttgataaacaaattccagataagtatgatgtcttaggtgctgttgtatgcattattggcgtattaataatgattttaccaaatagagcctgatcaagcgtgttgagagggagacgtaagtaatgatagttgaagtagagaatcaaaatcatggtatagatttaattaaaatagataatgacgatacgtatattgtatttacaaactatggagcacgaattgtttgttggaaatatcatgataataatattgtgttaggtaataaggtagaagcggatgaattttaccccgaaaatccatataaatttggagctactattggtcgatatgcaggacgtattgaaaatgcttcttttaatctaaacaacaaatattatcaattagaagcaaatgaaatgactaatcaacttcacggtggtagtaatggtttagatagacgattgtttgattatgaaatacaaaataatataacaaatattaaagttatatttaaacttcagatacaatcaaaagaggatggttatcctggagatatgatgattaaggttatacatacatatgatgttgaacatcgctggacgattgaatataaagcaacatcaaatgaagatacattattcaatcctacaaatcatgtgtactttaatctaaatagagataataatgtcattgataatcactctataataagtgaacaattaaaaatgtatcctattgatcagaatcatcttatttccagtcaacaacctattgatttattagaacgatttaatcatcgtcctattcaatttcaagatatttttaattctgaagataaacaaattaaagaacaaatccattttaataaaggactcgatcatccatttgatattggtcatcatcgtcttatcgttgaaaataacgagtttgcgttagatgtagaaacaacaatgactaatatagtgatttttacttttaacgatacatcagaatggaagagtgattttaatatttataaacctcattcaggtgtagcggtagaaacacaatacttacctaatgatattaataatgagggtaataaagctaaatcaattctaaaagctaatgttccattttatgcgaagacaatatatcatatttcagaaaaataactttatttttattcagaaacataccactatgacattaagtgatagaggtatgtttttatttattcattgctttttcttttaataatttcaatttttcaatacgtttaggagataagtaaggattattaatggcttgatttaaacggtctatattttcgcggtcattataataaatatcattcaaattttgaacagataagcgtgtaggagattcggcagttttaaggagtaataaatgatcttgttgctgcacataaccttcttttaaaacacgcatataaaatcctgttttaccggaggatgacatccgcttaactaaatgtttaataccatactttctttgaatcttccagcaaggttctcgtatttcagaaacttctacaattgcctctcctaattgatattgatttccaaaatatacatcattttcatcaaggtcaacgagagttaaattttcaccaaacattgcataatcaggtagtatattaatatcatttttatacattgaataattttccttactaaaacaacaaacagctttgtgtggaccaccatggtctttataagcttgttcatcctcactgaaccctgtataagataaccacatttttccagaaaacattgttttatttaaagcagaatgcattggacgtttttgatcatagtttaaagtttcaattttaccagttgaaatagcatataccggaatcatgttatgctctccttttttataatatctgttattttactatatttttaaaaagtataaaaatttttttgataaattaaatgaatgtaaaatagacctaggtattttaaaaaggctagtgtaaaataataaatgagtatatgaaaaggagttatagtaccgatgaaggatgcgaaagaactcaaattaatgacgacagatgatgcagtggctcaaattcaagataatatgattcttggaattggaacaggaagtacaattgaactattgatccctaagattgcagagcgtattcaacaagataatttaaatgttacaggtgtatgtacatctaataaaagtgaatttcttgctaaacaatataatattaatgtggttgatattaatgatattacttatataaatttagctattgatggtgcagatgaaattgattcagatttaaaccttattaaaggaggcggaggtgccttattcagagagaaagtcattgatgaaatggcaagaaaatttatcgttttagcagacgaaagtaaaatggtaaattacttaggtgaaaccttcaaattacctattgaagttgataaatttaactggttacttgtatctaaaaaaattgaagcatatcatgatatctcagtcgaacgaagaatgaatgaggatataccatttattacagataatggaaattatattttagactgtgaattaaaaagtaagatagatccttatcaattacatgaatttttaattcatctcacaggtgtgctagaaacaggttattttttagatatgacaacacaagcgattattggcactcaagaaggaattaaagtaattaataagaagtaaaaaagagaggaacatgtttaagttcctctctttttatttattagatttattgatatcattgatttcttcttttacatcatccactacagatgagcgtctatcttctgcatatttagaagatgattttaaatgatgatcaccgtcttggacttcagattcattagtctgtgtatgagtcacattattttcttgtaacgattgatgtaacgtttcttttttgtccaattcactattagatgtcttatttgaatcatctgtgtcatcatttacatggtctaaataattattaggttctacttcatctaatgattggtttgttgttttatataagataaagcgaatgactaaacttaaaagaatgaaaataataccaacaattgtcgtacttaaagcaatgactttcatagagaataagtcaccagtttcttcgctaaataagaatacttgagcaaatgtcattgcagcatggaatagcattgcaatataaatcgtacgacctttagttgctctgattaattcacccacaatcattgaaaacataaatgtatataagaagtgataacctgcatattgcattccatatgtcgtgttaatagtccaaatagaatacattaaacctacaatgattgaagcaaaaaatgtattgactttactttcaacaatattttgtaaatatgaacggaatccaaattcagcaaagaaagccatgaaaatatgaccaataataattgtaaatacagatactgataaatcattggcttgtaataaaataaaactatcagcaaatctattgaaactcatcattccaataataaaaataatgagcggtaaaattaacgcaagtattatacgttcaataactctaatatcaatagagaaattcaaaccagctagttgagtacgcttatttttaaatgcaataatacaaattattgcagcaataaatggcgctaaattattaatactaaacacaaaacgtttaataccaatagatgcttgaaagtctcgcaggattaaagacaatgccattgtaacaacgaaaaatacaaaaattgttaaagcccattgaaatcctgaaatacgtttcgtcttcatgtatgtaacctccattagggtaaccatatatatattctttccttaatattatacatattacaaggggataaataaattgtccattttaaatatcattaaaatgtaatagtattgaattatttttaaatttttgaaactaatatttaatgtctgaatcataaattaaagggtgaataatttaataaaaatgggtattgattgtataaaatatgttatatgattaaggtaaccttaaataattaggaggcatctattattatgtacagtaaaagcaatccaaaactatggaaaggaagagtagatagtcaaaatgatcctaagcagtttaagcattttcagaccgtcacatttgctaatttagaaaatatagaaaatcaatttgataaagttggtgtaggtttgttaggctatgccgttgataaagggatagaactgaatgaaggaagaatgggtgctaaaaaaggaccagacgaaataaaaaaagcttttgcccaattaccggatttaagtgaatgtgaatctcttgttgattatggaaatgtagaatatacaaaaggttctctaagtgaagttcaagaagaaatggggcgtttggctgctcgagttattcaacagcatcaccaatctttttttattggtggaggacatgatatcgcatacgcacaatatctagcaacgagacacatttatcctgatgcttctattggcattattaatatcgattcacatttcgagacgcgtgctgatgtacaatctaattctggtacaatgttcagacaaattttagaaaaagatgataatattgattacttagttttaggtttatctcaaggtagaaatacacgttctttatatgaatatgctgaagaaaaaggaattatctatgtatatgcagatgaaattttaaatgatttgtctccaaccattaaagataaaattgaacgttttattcatcagcatgaaacgattatgtttacaattagtatggacgccatcgatagtgcatttgcgcctggagtaagtgaacctactgtactcggattgaatcctcattctgtatttaatataggtaaacgcgtcatattaagtggaaaaacgtcttctattagtattgctgaagttaatccaaattatgatattgatcatcgtactgctcaacttgcagcgaattttattcaccattttatagagtagttattttaaaaatcgaagtgaacttttagataagagtagtccaccattctaagtaatggatatctactcttatttagttataagaaaagtttgataattatgatactatagactatacaacattttattggacttagagaaagggaagtgacattgatgacaagttttaacgacgttgtaaaatggagacgcatgtttcatcaatatcctgagttatcaaaatacgaatataaaacgacgcaacgtataaaagatatattaacttcatacaatattaaaatgattgacattccaatggaaacgggtctagtagcagaaataggacaaggagaaaagtgtatcgctgttcgtactgatattgatgcgttacctattcaggagcaagttagtcaagactttacttctactaatgatgaagtgatgcatgcttgtggacatgatattcacatggctagtatcttagctattgctaccaagttaaaagaagaagaagaacaattaaatggaagagtaaggtttttatttcagccagccgaagaacttggatatggagctaaagtcatggctaaaaccaatgcactagatgatgtacaagcgattattggatttcacaattatccaacattagatattggagaatttgcaattaaatcaggtcctattacttctgctgtagatcgttttgaatttaaaattcatggcaaaggagctcatgctgccaagccagagcaaggcaatgaccctgtaatggcgttagggcaattaattacaagtttgcaaacaattattagtcgtaatttatctgcctttgatagtgctgtcattacaataggagaagtgtcttcaggtaatacttggaatgttatagcagataatgcttatgttcaaggtacggtacgttcattcaaacctgacgtacaagattatattgaacaacgtatgcatgacattgctaaaggattagaacaattatttaatatagagattgaattaatttatacacgtttaccaggcgcagttattaatgacgtagagcttaccaaacatgctaaagaagcggcaaaaaaagtaggatacacagtaattgatttagaacatccatatacaattggagaagatttttctggtttattagagaatcatccaggggtatttgcatttattggatcgaatagcgaatatgatttacatcatccaaaatacaatccagatgaacgtattttagaaaaaatacctgattactttatagaactgatttatcaattattagcataatatttattagaaaatttttggaattatgatttaattactatttaatgtggtaaaccagtattgagtgattaaataggagatgattttaatgggtgcacaagatccaagaactaaatttaaagattctgattataaaaaacaagaacaagaaacaccaggttatcaatataaaatgtcacctaaaccagattgtggtgaagaatcatatgaaggtcatggtcgtttacaagattataaaatgcttgtaactggtggcgattcaggtattggacgtgcagcagcaattgcttatgctaaagaaggtgctgatgtagttcttaactacttaccaagtgaagaacaagatgcacaagaagttaaaaaagtcatcgaaaaagctggaagaaaagcagtgcttatccctggagatgtgagaaatgagcagtttaactatgatttagtaaaacaagcttataatgaattaggtggcttagacaacattactcttgttgcaggtcatcaacagtatcatgatgatattcatggatttacaactgaacaatttgctgaaacatttgaaacaaatgtctatccaattttttggactgctcaagtagtaactaaatatttaaaaccaggtgcttcaattacaacgacatcttcagtgcaagggtataaacctgctgcaattttacatgattatgccgcttctaaagcagcaattatttcattaacaaaaagtctttctgaagaatttggagataaaggtattagagtgaatagtgtagcgccaggaccattttggtcacctttacaaatcagtggtggacaacctcaatcagcaataccagaatttggccaagctactccactaggtcgtgcaggtcaacctgttgaatgtgtgggaccatatgtattatttgcttcagaagatggtagttatttaactggtcaagttcatagcgttactggtggtattcaaatcgactaatttagtaaaatgttaagtatactggcgagagatttttagaaatctctcgctttttatgttataaaggagaattaaaaatgaaagagattaatccaaatcaattatcagacattcaaaattataaattattaagtggttcagttatacctagacctattgcgtttgtaacatcggaagatgaaaaaggtaatttaaacggtgcaccatttagctttttcaatgtagtgaataataagccacctatgatagcaattgcagcacaaagaagtaatggtaagcgtaaagatactgctataaatattgaaaaaacaaaagaatttgttgtgcatattacagatgaattcaatattgaagatatcaatgagacggctgcacctttaaaatacgaagacaatgaattagaacgcacatcattgactcttatcagttcatctattatacagacgcctgctgtgaaagaagctaatattcgttttgaatgtaaattagatcaaatgattcaattaggtactaaaaatgatggtgctgatttaattataggagaagttgttatgtatcatataaatgaagatgtctattttgaggatagtaaaattgattttaatcagcttaaacccgtagcacgtttagcaggaaataattattctaaactcggagacacatttacaattgaacgtccagaatcataataatatgaattttacatgtaattgtattgacgatgatacatgaatcttgtacctttaaatataaattcaattagtattaatgaaagtaggttaaatatgggagaaggtaataaagggcatgcatgggcactactacctcttgtgctatttattgcattatttttaggaataggaatcgctactggagattttagtaatatgcctttaaatgttgcgataacgattactgtgattgtagcattaatgatgaatagaaaagaaaaattttcaaaaaagattgaaatatttacccaaggagcagggcattcaaatattgtcctaatggttttcatctttatcttagcaggtgcattttcaactactgctgaaaaaatgggtggtgttacgtctacagttaatttaggactatcactcataccacaaaattttattattgtaggattgtttataatttgtatgtttgtctctatctctatgggaacctcagttggaacgatcgcagcacttgcacctgtaggatttggattttctcaggcaactgatatttcagctatgttagcgatgggaacagtagtaggcggtgcgatgtttggtgataatttatcaatgatatcagataccacaatagcagcagtacgtactcaaaaaacaaaaatgagcgataagtttaaagttaatttttggattgttttaccaggtgcaattctaacaattatcattttatttttcttaacaaatggtgtacatgttgatcattctaagcaatatgattataacttagtgaaagtcattccttatattttagtgcttgttttagccgtcattggtgtgaatgttatcgtagttttaattagtggtactatactttctggaatcattggtcttattgatggttctttcaattggaaaggtttattaactgctatatcaaaaggaattattggaatggaagatattgcaattatagctttacttattggtgggcttgttggtcttattcaacataacggcggtgtagaatggttgcttaattttgtgaaatcgaaagtgaaatcgaaacgtggtgctgaatttggtatcgctagtcttgtgagtgtagcggatatcgctacagcaaataacacaatttcaattattatgtcaggaccattggctaaaaatattgccgacgagtatgaagtagatcctcgtaaatcagcaagtcttcttgatatttttgctggatgttttcaaggtctgttaccctatagccctcaacttattgcagcagcgggtgtcgctggaatatctccttttagtatgatgccatattgtatttattcaattttattaggcatttgtggaattctagcaattgtatttagatttccacgtcttaagacgaaataaatgatatataacaagttaaaatcatctaaatttatatttttttaatttctgatagttgaaattttggtagtatttataaatgcgttaaaatataactaagagtgaaagtaggtgagatgagtggcaaaatataatgtagaaaatgaacaagttgagattcatattgagcgtttatttaaatattctccagaattggtttatagtgcttggacagatataaacttattaaagcaatggtttatgacctcccaacgaacaaataagttatttgatgcagatattcatgaaggtggacaatatcgtatagtagatgctcgtaatggtaaacaaaatgtaattcaaggtaaatatgaagaattagtatccgatgaatatatcaaaatgactattggaatgccagaattaagcgatagtcaagatgttattgaagtagaatttgaagagcgtgaatcaggcggtacgcaaatgttcttttactatcaatctatagtagaaaaagaacgtcgtttaacggctttagaatataaacataaaaagaaagaatatcatgattctactgcacatggtttagaattaatgtttgatcgaatgaatgaagttttagatcaatatgtagaggacaatgatatgttactttaattaaaatgaaaagacctattgagtaagagtaagttattacttaataggtctttttatttattataattcaccgttttcttttcgctcattatattttcttagtagcgtttcaaagaagatatgataattaataaagctagaataatctatatcattgtataaataaaatgtatgactagaaacgtaaacattataatttgccttttgtgctaatgtattgtctttcatggttgtaacagaaataaaataacgttggcgcaattgaagtaaattagtaatctcagttaattggtgagtttctccagataaagaaatcacaaaaaataagtcatcttcattagagtagttaagtaccattttaatctcatgttcatcatgcaatacaattacatttttatgcatagttaataagatacgttgtgcctcttcagctacatttttctgagctcgtccagtaccatataagtatacattggtagctttatcaattttttcagtaataaggttaaaatttaccctttctaggtaagtaaatgttgtttcaatttcttgtttaaattgtttgattgaatcggtaggaacttcatgtaaagattgactttcaaattttaaataagatttaaaatcactatagccatcaaagcctaatttacgggtgaaacgatgaatcgttgcgtttgatgcatgtgtatattgtgatagttcttgtatttttaaagttttacattgttctatatgtgtattaacaaaatgagctatatgaaggtcattgtcatttaatttatcaaagttagcattaactctctcatctaataacatataaacacctcaagttataatattgaaaattttttcatctatagaaaatataaactgattatacaaaaatatttcaaaatgagtcaatgccattgtatatatgaaagcgtttactataatagaattaagatattaagaaagcgcttaaaaaagtgcaatatcatatgattaatgatgatatttagatttgggggtcagcatatgaacgcaataaaacgttttgggagcgcaatgatagttccagtattaatgtttgcattcttcgggattatattggggtttgcaacactatttaaaaacccaacgataatgggtggtttggcagacagtcacacattttggtttaaattttggtcagtcattgaatctggtggttgggttatctttaatcacatggaaattgtatttgtagtagggttacccatttcacttgctaaaaaagcaccaggtcacgcagcattagcagctttaatgggttacttaatgtttaatacatttatcaatgccattttaacgcaatggccacatacgtttggtgcaaacttacaaaagggtgttgaaaatgttacaggtttaaaagcaattgcaggtattccaacattagatactaatattttaggtggtatcattatttcagctattgtaacttggatacataatagatattacagtaagaaattacctgaaatgcttggtgttttccaaggtttaacatttgtagtcactatttcattctttgttatgttactagtagcagccattacatgtgtagtgtggccaacgattcaaagcggaattgaatcattacaacacttcattattgcttctggttatataggcgtatggttataccatttcttagaacgtgtattaatacctactggacttcaccattttgtttatgcaccaattgaagtaggtccagttgtagcaaaagatggtttaaaagcagaatggtttagacatttaaatcaatttgccgaaagtagcaaaccattaaaagatcaattccattatggtttcatgcttcaaggtaatggtaaagtatttggcgcaattggtattgctttagcaatgtattctacaacacctaaagaaaatcgtaaaaaagtagctgcattattgatacctgctacattaactgctgttgtagttggtattacagaaccattagaatttacatttttatttattgcaccattcttatttgttattcacgcattattagctgcaacaatggatacaatcatgtatggttttggggtagttggtaatatgggtggaggactgcttgactttattgcaacaaactggattccacttggacaaaatcactggatgacttatgtagctcaagttattattggtttaattttctcagcaatttacttctttgtatttagatatcttattttaaaatttgatattccattaccaggacgtcgtgctgaagaagaagtgaaactattttctaaaaaagattataaagagaaaaaaggagaagatagtacagatacttcaggttttgagcctagtaatgaatatgaagaaaaagcatattattatttagaaggtttaggtggaaaagaaaatattaaagatgtgacaaattgtacaacacgtttacgcttaactgttaatgacgaatcaaaagtagaagatactgcatattttacacatcaacaaatgtcacatggacttgtaaaaagtggtaagaatgtacaagtagttgtagggatgaccgttccacaagtacgagaagcatttgaacacttagtgtttgatgaaaatgataaaaaataagataccaaaagggtcgaaacattttgtttcgaccctttaactattctaagaaatacgtgcattatgtattgcgcgagttttgtatgtggctgataaaatatcaatatttcgacaagcaataaactgaatgagttttgagaatacttctggtttacaacatacgctagcacaattattgtttaatgtataagttaaatcatattgattagagaaatatgtcattatatcaataactttatctttaataaaagcatcttgtaatccatctatacataaattaaagcgtttagaagaagaataatgttgtccagaatccaataagatgtgtgtatttctagaagaaagaatttgataaatagaaatttggtaaaaacttaaaaaactaatgaaatagggtaattgttgtttaggtaagctgatttcaagggctggagtattgttatatttaataatgttgtattgaaatgattcgcaaaattgaacatttctgcaaattttcattaattgctttttagtcgatcttgattgcaaacctacaatatttagaatgtaagtttcaaatttatctatccacatgcaagaacctcccaattcttaataatatgtagtcttcatgtcattatcattcttaaaatgaaacacgccgttcccatatacagtctgattgtatcactctttattatgattatcactacgacttttgaatgaattttaatttaatatttttgtaatatattcgtaattctatttaaaagagaaaaaataaaaattttcatatttttaaatattctgataatttattgttttactttttctcctatgatactcttatttcattatttaaaataagagggtgaaattatgttaagtaaagtaagtgaatttgcaactaagacatttttattatggatgtttattgctgctattataggttttatatttccaactcaactagcgacgattggtcaattcgtcccgtggctattaggaattgtaatgttaggcatggggatgacaattaaacctagtgattttaaattagtttttaaagagccgaggtctgttattatcggagtaattttacaattcactattatgcctaccttggcctatactattgcgaaaatatttcatttaccagctgagttagcaattggagtgattttagttggatgttgtcctggcggaacatcaagtaatgtcatgagttatctagctaatgctaatgttgcgttatctgtagcgattacaagtgtatctactttattagcaccatttgtaacacctgctttaatttatttatttgctcatgagtggttacatgtatcatttttaagtatgctatggtcggtcattcaagttgttttattaccaataatcataggattcattctacaacttgcttccaaaaaagtaactcgagaagctactaaaattttaccaattatttctgtagtagcgatttcattgattttagcggctgttgttggagggagtaaatcacaaattcttaaaactggattacttatttttattgtagtcattttacataatgcagtgggctatttattaggttatgttttagcacatgtattcaaacttgatagaagagacaaaaaggcggtttctattgaagttggaatgcaaaattcaggtttagctgtgtctttggcaactgtacattttaatccactagcagcagtgccaggagccgtattcagttttgttcataatatttctggacctattcttgccaaatattggtctaaacgttaatgtaatatgttaaacttacctataatattaagtttaaaggagaaatatcatgtataaagcaatagtattcgattttgatggtacaattgtcgatactgaacaacacttgtttaatattattaataagcatctaattagtcataatgcaacaccaattacactcgatttttaccgtgaaaatattggtggagaagcaaaggatttacacgaatatttggaacagacgattggaaatgataataaagaaactatttataaagaacatcatcaaacaagcaatcaattagaaattaatcctacgattaaacaattgatgaaatacttaaagcaacgtcatattcctatggcaattgcgacaagtagttataaaaaggatatttttccagtatttaagagtttaggtttagatgaatatataaatattattgttgggagagaaagtgtagaatatgtaaaaccagagccagaactttatttgactgcggttcagcagcttaattattctccaacgcattgtttagctattgaagactctgtaaatggtgctacagctgcttttcgtgctggattagatgttatagtaaatacaaattatatgactcaaacacaagatttctcaactattccatatattggtaaagatttaaataacgaagaaattataaatcgtttttttgaaaagggtcatgtgtgaatgaaatgtcgtggcaattaattatcttctttttagctggacccattattattggaataggaaatcttattttaggtccaatatttaataaacgtattccttttagagttcgtatacgttcattcatgttaggatcaatgatatatcttatacttgcttttatagcgtatttctttttgttacaaggcaaattataaagtgatcgaccaatataacagtaaaaaggaacctttttctaaggttccttttttattaaataattatttttagaataattgtaaagactaataaaacaattaaaatcgcatcaatacctaccattacggtaaatctagtgcttttagatccttgagatttagcttgtttcattgcattataatttggtatgagacttaaaaataataaaacaataattaatattataccgatagtgactgacatatatatttattctccttttcttttttcaatccattcccatataaatcctgcaataatacctacacagattcctattaaaacaccgaactttggagaagataatactattcctataattaaaaagattataacagcgatagataaagtaatactaaattttattttacgttgatcagaattaaagattgaaaatacaattaagtatagtaagaaaaatgctaaagttgctaaaaacgttcgtagtataagcgaacttaccatgtgctgttgttcactaaaaaagttcagtaaaaagaacacaatagcaaaaataatagatatttttatatccttttttaataaatgctgcataaggttaaactcctttaagtctatataagcagtatagcatactgctaaagtatcaattaaatatattaatttagtaatatgattctcaactaaaaataactcaataatacaaatattaaattattcatttttgtaaaaaagtaaaaatattttaattaaattaatgaaaacgctttcaaaataatttaaaaaatatattttattttctgaaaattatagtataataacttcaataaggtaaaggatatgtcgactaagaaaacgtaataaatattttctaaagtttaaaagtatcgcaccttagtccaaatagagatggggtatttttatggataataatgaattacataggggactgagtgcacgtcaaattagaatgattgcgcttggtgggacaatcggtgtaggtttatttatgggggcaacaagtacaattaaatggactggaccgtcagttatttttgcatatttaatcgcaggaatattcttatttttaataatgagagcaatgggggaaatgacttatttaaatccaacaacaggttcatttgcaacatttgctagtgaatacatacatccagctgctggctatatgacagcgtggagtaatatattccaatggattgtcgttgggatgagtgaagtcattgccgtaggtgaatatatgaattattggttccctcatttaccacaatggataccaggcgtgattgcagtagtagtattattaatagcaaacttagcttcagttaaggcgtttggagaatttgagttttggtttgcaatgataaaagtggtaacaatcatattaatgattattgctggattaggattgattttttttggaattggtaatggaggacaccctctcggtatttctaacttatggagacatggtggatttatgccaaatggattagttggtttcttctttgcactttcaatcgttattggttcttatcaaggggttgagctaattggtattactgcaggtgaaacaaagaatcctcaagagaatattaaaagtgctgtaaatggtgttatatggcgtatattaattttttacataggtgctatttttgttatcgtttcaatatacccttggaatcaattagaaagtattggtagtccttttgtagctacattctctaaaattggtattacatttgctgcaggtttaatcaattttgttgtattaactgctgcattatcaggatgtaactctggtatttttagtgcaagtcgtatgatatatacacttgctcaaaaagggcaaatgcctaaaatctttacacgtgtaatgaaaaatggcgtgccattttatcctgtattaactattgcaattggtattttaatcggagcattattaaatgttattttacctttatttataaaagacgctgatagtattttcgtgtatgtttatagtgcatctattttaccaggtatgattccatggtttatgattttaatcagtcatattcgttttagaaaattacatccagaacaggttgaaaatcatccatttaagatgccaggaggctcaatttctagtgttatgacaattgtctttttactcattgttttaattggtatgttatttaataaagacacagttatttcagtagttataggtattattgtcttagcaggggttacagtgtattactttattcgcggtcaccacaaaaatgatgctataaaaagagtaaaataaggataaaactatatattaaaaaatctgagacatgcataaacgtctcagattttttaatgtttggatagtaaatccctaagttaaacatagactaatatcaagtttttcaattgtagaccgagaccctaacataaagccattcaaaaagaaagtcgacaaccaacgtaagttaggaatgaagtggaacaatgagttctatcccactccttttttactaatgtttaaattcaatttttgataaatatttgtgataattatctaatgaaatctttgactgtgttatatagtctaaagaatcgtgataattacgtgctataaagcggtaaaagataatatcaatcgtatataattgtgcaaataatgcagtcgtcgcactcatacacagttcgtttttataatcttcattatacgttaaaactaaatcagaatcttttgcaattgaattattgttagaacttgtaatagtaatcattgaaagattaaaatctttaacgacttttaccattgcttgtagttcgctctgttcaccactatttgtaataaaaacgacacagtcatttttattatgtgtagacaacattgtagtaagtaaatgtgtatcttgaactaattgaatattgagaccaatacgggataatttctgataaaattcaagggcacacacatatgaactcccataaccatatagaaaaatggtatgtgcctgtttaaatgtttcacaaatagcgtcaatagtttggtgatctataaaatgattactttgttttaacgacgctttagtttgaaaatataatttttgttttaaactttctactgattcattttctactaacttgatattatatggtgtgacttgtttaggaaaccattgcttaatttcatcgcgtatagctttaaaattttgattaattaatttttgactataacgattcatagtagatacactaatattaagctcatctgcaatcgcttcattagacattgaaactaatttatgtggagaatttaatatgaaacgtgaaagtttctgttcacttttagaagacgaagcgtagacttcatctatcctacttaaaatatttgtcatccaatcacctaatttattaaaagtttttctttcatcataaatagatagatgaaaatgaaaacatctctatctaggcatgtgaatacatcatatattacatctaaattcccacaaatatcgataaataactgtaaagtgattaagttaagtaaaggtttacgtaataggattaccgaaataatgtgatattctcccatcaatatgacattatttcgaagattaaaaaaatagtatgcagtttttacttaatattaatcaagcattattatacatactatcaattacaatgacaattcacctactaaacttatcaaaaaaataaggttattgataattattaatctgattataaactttataaatatgattttgacgttcttgcaaatcaacgattaaatttccatttttaaaattttgaagagggatctgttttaagtgagtcaccaatttattgtattgctcgaaacaatacatttgtgaatcagaacaatgagatgaaatactatttatttgattatgtttaaaatgagcacggcaatgagtaataaaattattgtaatctttaattcccaaagataaatgtgctatgtccataaaataataatatttagctttttctagtaaaattaataattgaattaaaatgtgttgatcgtatattaaggttttataatgcatggtacactcatcctttaaaagagaatgttaaggatatatggtgtgtaagcatttagtatttaagaatgaaagtgagaatacatcgaaatttcttcaatactcactatattcattattcattgtttttagtctgtagaaattccttatagttatgaatagtaatatcgtatgtttgaatctttttttcaaatgaataagaaatatcaacaatatttaatattgataattcacgagttctaccgaatccaatttcataaacaatagcaaaccattgaccgttacggcatagtaaaccgatgaatatcacattttctgcagtaatttcattattttctgaaaagtcaacaagcataacatgtctttcgttactataaattaaaatttctgaaaatagatgtggtaatgttagagaacgtgtatcttctaatttaatattattggagatatgtttcagtatttttagcatttgtgtattaggtgtttttaaacattgattcataattgaacgaatgtcttgagtgtaaggtaatgtagagtgagattgactttcttgcaaagttaaaaatagtgcaataagttcagattcatttaatttaagttgaaaataatgatcagtattttgaatttcatatccaccatgtcttcctttatgagcgtatatatgaacgcctttagattctaagtcattaatatctctagtaattgtacgggtagaaacattaaattgttttgctaaatcagaagcattgattttatgtccttgttgaattaatgacatcatttgattttgtctttccattttattcaatatactcaccacctatgaacattacatattacattaattataacataagaccgggattcaagacatttatagtaataagttgattataagtgtaaaaataaactatttttatttagaaaacgcttacaattattaggtgattatgctaatataatatttgtaacagggtagaacgatttcaaacaaaggggtaggggctatataacagatagctcaaggtgagtcgttcgggttacatcgaaacatcttcaatatttattacttactttcctttctattttgtcggctagcaaatgactagccgattttttattttaaaaaaataatatgttatatgataagatgaataaaaacgttgaggtgacatcatgcaaaatcaacaacttcaatttatagataagcatattacgaattggttccaacatttagatgatattattcctaatttaattaaaaatatggttacagaaacaaaagaaaatcgattcgatttagttacaaatgtagataaacaaatccaaaatgatttcgaagcctatcttgaaaagtattttcctacacatcagttattagctgaagaaaaaaataatgatggtattgaaccctatcagggacacctttggattatggaccctattgatggaacagccaatttagtgaaacaacaagaagattattgtattattttagcttactttgaaaatggacaacctaaattatcttatatttatgactacgctcataaaataatatataaagcaattgaaggtaagggagctttcatgaataatgtcaaacttgagtctccagaagtattatcgcttaaagatactattgtttcatttggttcagaatacgtgagtgaaaatttaagtaaagctttgtatcaatcgtcttttagtgtgagatatataggagcttgcggattagattcagtgcgagtaattaaaggacaatttggagcacattttaataccaatcctaaaccttgggatatcgcagcacagtttttattcgctaaagaattaggattagtgatgacgcaaatggatgggcaacatcttgatttcgctaaaggtggtccctttattattagtaataaagggtgctacgaggagatattagctattattaatgatgaacactaatacttctattcttagttatttgatatatttcctactaaagttgtatagtaaattaaatcatttaatatataataatggagatatattttaatataaatagaataggaggaggaagatgcaacgtcctgataagaaaaaacattcctctagtaaaataatgaaatgggttattagtatacttgttgtgttagctatcgttgctgtagccgttatcgcagcaacgatattgatcacaggtaataaaattcataacccgcttcatcgtcaacaatctgaattgcgttctcataatgttaatttaagaaatggagatccatttacaattgccttatttggtgttgactctaatgcacaacgtaaaagtacaaatgatggtgaacgtagtgatacaataatgattttatcagtgaatccaaagaaaaaaacgactgagcttgtaagtattccacgtgatactcaagcagaaatcgtaggaagaggtacaactgaaaaaattaatcatgcttatgcttatgggggccctaccatggctgttaaatcattagaaaaactaatgaatgtgccaatagatcactatgctactattgatatggatggattacacgacatgattgattcggtcggcggtgttaacataacgagtaatgatacatttacagttcaaggtacaacatttactaaagggcaatccactcatgttgatggagatacagctatggcatttattagaagtcgtaaagaaacaggtgcaggtggcgattttggacgtcaagaacgtcaacaactagttttacaagctatggcaaataaaatggtgagttcttcagcgattacacatttgccatcattaattactcaaattcaaaagaacgtcacaaccgatttaacattaggagacttaaatgaaattagaagtcattataaagaggctaatgatacagtgaatcgtcatcagctagaaggtacaggtagtattcaaaatgacggattatggtattttattcctaatgaaagttcaaaagggcaaatgacagaggtattaaataataatttgaaaaaataaaagattgatatagaatttaaaaaatctgagactcatttatatgtctcggattttttatttaaagatataaaaatttaagagtatatgctttatttaaaagaataaagaaaggtcaatagatagtattgaaagccttaacattatatgattttagttatacaataatattaattctgtattgaatatggggaaacaatacagaatcttaatgaaattggttgtttacggaatataattataaggtggggaaagcaatgcaagaacatttagttttaaccctagatgatgtggattatcttgtagaacctggaacaaatttactcgaatttattaaatctcgtgatactttcgtgccttcaatttgctataacgaatccatgggtccaattcaaacctgtgatacttgcatggttgaaattgacggtaaagttgaacgagcgtgtagtacagtagttgaccgtccgatgtcagtcaatactcaaaataaacgagtgaaagctagccaaaaagaagcattagatagaattttagaaaagcatatgctgtattgtacggtatgtgattataataacggtgattgtgagattcacaatgccatggatgcatggggattacaagaacaatcatatgaatataaaacaaaaccttatgaaaaagattatggtcctttctatcgttatgacccagaccaatgtatcctatgtggcagatgtgtagaagcatgtcaagatgtggaagttaacgaaacactttctatagactgggatcgtgagcacccacgtgtgatttgggataatgatgttccaataaatgaatcgtcttgtgtatcatgtggtcaatgtgcgacagtatgtccatgtaatgcaatgatggaagtcaatatggagggtaatgcaggatatttaactgatacagaaccgggttcattagcagctatgattgatttaactaaaaaagctgaaccaggagatggattgttatttgctgtgtcggattctgaagcagagatgcgcaaagaaagaattaaaaaaactaaaacagtatgtacatattgtggtgtaggatgttcatttgatgtatggacaaaagatagagaaatcttaaaagttcaaccatcacacgactctccagcaaataaaatctctacttgtgtaaaaggtaaattctcatggggacacattaattcggatcaacgtttaactaaacctttagtacgtaaaaatggtgaatttcatgaggttgaatgggaagaagcccttgatgttatagaagagaactttaagcgcattaaaaataaatatggtggcgatcatctagcatttatcgcctcttcaaaaggtacaaacgaagagtcatatttaatgcagaaactttctcgccaagtatttggttcaaataatattgataattgttcgaggtattgtcaagcacctgctacaaaaggattatttagaacggtaggacatggcggggactcaggttctattgatgacttggaaaaagcagctatgacggtacttattggtacaaatacagcagaagcacatccagttattgcttcaagaattaaacgtgcacagaaattgtttggacaaagaatgcatgtctttgatattcgtaaacatgaaatggctgaacgtgcagatgaattttatcaacctaaacctggtacagacttagtatggttgagtgctgtgacaaaatatattatcgatcatcatttacatgatatcgaatttattaaaaagtgggttgacaattttgatgaatactatgagtcgttaactccattttcattagaatttactgaagaggttacaggaatttcaaaagcgcggttaattagtttcgcggaagaatgcgcaaaagcagaatctgtagctatttgttgggcaatgggtgtcacacaacaagatataggtagtgatacaagtacagcaatttcaaatcttcttcttgtaacaggtaactatagaagacctggcacaggggcttatccattacgcggccacaataatgttcaaggtgcaagtgatatgggaagtatgccagatcaatttccaggttatcaaatgatacacaatgatgaaattagagcgaaatttgagaaagagtatggtgtcacattgaatccaacgcctggtcgtgataatcatcaaatgatggatggtattcatgaaggacaaattcattcactatatttgtatggtgaagatacaggaattgtagattcaaatattaactatgtacaatctgcattagaaaaagttgaatttttggtagttcaagatgaatttttaacatttacagcaacgtatgcggatgttgtgttaccagctagtccttcgttagaaaaagatggcacatatacaaatacagagcgtagaattcaacgtattaatcaagcattatcacctttaggtgactcaaaacctgactgggtaattttccaattgattgctaaaagaatgggctttgattggaattatagtcatccttcagaaattatggacgaaattgcacgcttaacaccttcttattcaggtgtcagctatgaaagattagaaggttttaacagtttacaatggcctgtagcaccagatggtatagatcaacctacattatatcttgatggctttaatttcgataataaacgtgcaaaattatttaaattaacatttgataatttctttaaagaagatgaagtatatgatttacatgtgaataatggtcgcgtactagaacatttccatgaaggaaatatgacatatcaaacagaaatgattaaatataaaatgcctcatgcatttgtagaaatttcacctgaattagcaaaagatcgcgatatccatgagggtgcagaagtaaaacttatttctgatacaggagaagctactttagttgctacaattactgatagagttaaaggaaaagagatatatattcctttaaataatgatgctatgagtaatggtgatataggtgctataaataaattaactaatagtgacgcggattatgctacacacacaccatcttataaacgtacacattgtcgtttagaggttataactagaaaaggtaaatctcctttaaatccaacgaatttccgtgtagataaacatcgtcatccacaatatagtgtccaagttcagaaaaaatggaagcgtaaggattatattttcccgggaaatgtggtggattaatatggctgaaagaataactaaaattaatcgtcttgaaaaatcaaaggaacaacttaaattggaaagtttgaatgaagttacagatgcaattgttgaaaataaggatagtattttaaaagctattcgtattattaaaaatttagatgatgcaaaactcttagatgctattaacggtggtattaaaggtcgtcaagttattataaataaattcgctacggaattaaataaagatatgtatactggactgattacaaatttagctccaatggtatttatgcttggaaatctagaagttaaagaactaagtcaatttttaaataaacttaatagtggcttacacgtagctaatcaagcaagtccaaatgccaaaatgacgatacgaagcttaatgagtgtattaaaagatgatgatatgaatcgtagcttaacgtacatgctaaatttacttaaaggcatgtctagaaaataaattgaatagatacgactccttaatataagaatgagatgacttatgttaaggagtttttttagaaatgaatttgtaaaatatagtatacatctattatgataaagtagagtgtataaattaaagtgtaaggagagaggacttattcatccaaatattattaaaataatgactattatttctaatatttttgttatattaggaattatatttttaattatgatgaaattaatgttagcgatagcaatgtttgccgtttcattggcaattagtcttgttatttttaatgtattatttcgagatcgtacgggcatgaaaattattattaatatttcgtttgccatcgtcgttattgctattatagttgcatacagtatgttatctaaataagacaattagaggaatttcaatttatgaaatatagaaatagtaatcatttacgtttatctattatactttttatgtttattctcatcatattgattgtattactttgtatcaatcataaggatatactacgtaatgatcgaagatacagttttcaagaggcctttcaaaagcaaacccaatcaaaccaattaaataccattgataaaaataatcagtttgttctagcgaataataatgaagtgaaaagagcaatgagtatttctaaaaaagataatgatttaaaatatatggatttatctaaaacggttccaatgaatgaagatgaggtaaaacatatacttaaaaataaaggtattttaacagatcaggcccaaacatttttaaaggcccaagataagtaccaagttaatattatatatttaatgaatcatgcaataatagaaacagcaaatggtcaatccgaactggctaatggtattaaagagaataatcataaatactataatttttttggaattggtgcatttgatcaagatgccattgctactggtcatagttatgctaaagagcatgattggacaacaccaagtaaagcaattatgggcggtgcagcttttattcgtcatcaatattttgaaaacgaacaaattacgctttatcaaatgagatggaatcctaaaaatccagggtctcatcaatatgcgagcgatattgagtgggcagataaaattgcagataatatgaaaaaagattatgaacgtttgggtataaaaaaagataagatacgtaggaattactatatatctaataaatagagatattgaggtgtaatagaatgaaagttgcagtgataggtgctggtatcggaggtttaacggttgcagcccttttacaagaacaagggcatgatgtcaaagtctttgagagaaagactgatattaaagaagtaggtgctggtattggcatcggtgataacgttttaaaaaaactcggtaatcatgatttagctaaaggtatcaaaaatgccggacaaaatttaaaatcattaaatatctatagcgataaaggcgacttgcttacatcagctaaattgaaagagggaacattaaatgtgacgttatctcgtcagtcattaatagagttaatatattcatatgtaaaacctaatactgtatttacagattatgaagtgactaaagtggatgttcaatctgaactgccaatgcttcatttctcaaaacatgcaagtcagacgtttgatttatgtattggcgcggatggtattcattcagctgttagaaaagcattattcccagactctaaagtgatttatcaaggttatacgtgctttagaggaatgatagatgaagtggacataatgaatcaatatacagcagatgaatattggggaagacgtggacgcgtgggtattgtgcctctaatcaataatcaagcctattggtttattacaattaatgcaaatgaaaaagatcctaaatatgtatcatttgaaaaaccacatttgcaggcttattttaatcattatcctaatcaagtgagagcattgttagataaacaaagtgaaacaggtattattaaaaacgatttatatgatttaaaacctttaacttcatttgtacatcatcgtacagtcttactaggagatgctgcccatgcaatgacgccaaacatgggtcagggcgcaggacaagcaatggaagatgctatcgttttagctaattgtattgcttcttatgacttaaaaaaagcattacagcgatataataaattacgtgtaaaacatactaaaaaagtaataaaacgctctcgaaaaatcggacatatcgctcaaaaagataataaactagttgttgcattgcgcaattctatcatgaaacatatgccaaaacgattttttagtggtcaaactaaatttttatataaaacaaaagataaataaggagtgatcatagaattcactatggattctatgatcactccttattattttatttaatattattttttattaacaacaaattgcggttcttcaccattcaattttttaattgtatcattagctacaattttagacatcatttcacgagcttcaaacgtagcattaccgatgtgtggcgtaatgactacgttatctaaagatttcaagccttcagtaatatctggctcgaattcatacacatcgagagctgcaccttcaatatctttatgtttcaatgcatcaacaagtgcctgttcattaacgattggtccacgtcctgcattgactaaataagcagtcgatttcatttttttaaattgttctgaatcaatcatatggtgtatatctggattgtaagcagcgttgattgtaataaaatcagagtgttctaataatgtatctaaatcaacgtatttagcaccaatttcacgttctttttcctttttttggtgaggacctgtataaaggatatccatatcaaatccttttgcacgtttagctactgcactaccaatttctccaaatccgataataccaagtgttttgcctgagacttcacggcctctaaagaataatggcgcccaaccatcaaatccttttgtacgagaaagtttgtcaccttcaacgatacgacgagcaattgctaatactaaaccgaatgttaattcagcagttgcagctgtagatgcttttggtgtatttgtaacatcaatatttttttcacgtgcataatctacatctacattattaaacccagcgccataattggcaataattttaagattttcaccgctgtcaatcacttctttatctacattagtagataaaatactaatcaaagcagaagcatctttgacacctttttttaatgtttctttatcgatgatatcttcaccttcatacatgtctacttcaaaatgttctttaagtagatttaaaccagcttctggaattttaccagctatatatactttttccatccatctcactcctttgtaatctttcaaattaagtataatggaagaaagatagggacacaaagaatttatatgaataaagttattgtattatttttaaagcaattacggatattaagattaaagcaatacaaaatatacgaataaatttttttgattcattatagaaaatcatacctacaatggtacctccagcagtcccaatccctgtccatattgcataggcagttcccatcgaaatcgtctgcatagatagttttaaagtactaaagctaaatataaatgtaagcgcacctagtagaatatatatttttttatgtgtacgattcagttcatttaagaaaacaacacctaaaatctcaaagcatcctgcaactaaaaggtataaccacgccattttatagacctccttcagattggtcatcagtagaaatctttaatccgataatacctataattaataaaataataaataataatttcataggtgaaataacgtgattaataaataacatatcaacaatgactgttcctgcagcgcctataccaacaaaaacagcataaacagtacctactggaagttgttttgtagcagaaagcattaaataaaaacttaaagcaataaataataaagtgataagccaagtaaacgtattatgagcgtaatttaaacacgtaacccaaacaacttctatcaatccagataaaatgacctttaaccattgcattacatccattactccttatagtatttttgataagtaaaaacattttctcagacaattatgagttatgcaattttagaaaatagaaaagtgagaaagaattcattgtgaattcattttctcacttttaaattaatgaaaatataatcttaaaggtgatattaaacggtaatatatttatattcaagttatatcaatcttagatatttatgataaatgaatataattataagaacttacttcgcttgctgaaattgtacgtgtatccgtcacgtaggcgccacctgtataattcatttctgaaattgtaattgatccatcactatttacactttctacataagccacatgtcctaaacttcctgctgtggtttgtaaaattgaaccagctttggcatgatgattaactgtgtatccagctgcttttgcagcatttgcccagttatttgcattaccccatgttgaaccaatagcaccattcactttgtcatatacataccatgtacattgaccagcggtgtacaagttgttcttagttgaagatgttgtcttagttgatgtactcgttacacttgaggaatttgaagtagatgaactactagatgacgtagtatgagatacactatttaatttattcattgtagatgtggcgctagctacatcttctgtagtatgactggctaaatgtagattaggatttgtatgattgtttgagtaaatagtattagtgaaatgagaaggtgcttgcttgttagtgacgatttttttagattttgcttcattatagtgaattacattttgattttgcttttgttgattcaaatgttgagtaggttgattttgtgcgttgtagtttgattgaccaaaatgatatctttgattatttagatttgaatgattaatttgacgtgcttgatgtgctatattagattgacttgtctgttgatgattatagccttgcttttgaagttgattctgattttgttggtgatttaaattttgttgttgttcactattattatgttgtttttgttgattcacttgttgagtagcttgattttgagttaattctgctgcatctgcatgatgtatatttaatccaaaagcagagactccaattcctgctgtcagtgttgataatgtaattaattttttcataaataaagtcctcccaaatactattcaacaataggataattttagcgatatgttgaatatgttttaacattaacttgtcgctgttaacgataagtcatactttatcagataaaaacatgtagtagggcattgttactttaccgtaaatgaaattcaaaattcttgtacaacgatgtaataaaaatctgtttaatatttcttaatgaaatatttcttgcaaactgcatgtttgctatacattttctaattttttgaaaatattaatagaatttatattacagcaccttgtaataaacttattttatataaagatatatacataaaggataagcggttacatttatggagatttatttgatatcatactactaatagtgtttgtaaaaatttaaattaggctatagaataaaataatactattttgaagatgcagtatttatatctgcatctttatttattgataataattttttagatgactattaaaaattctaaatagagaaatgaggaatgataactatgaaaattgcaatagtaggatcaggaaatggtgcggttacagctgcagtagatatggtcaatcaaggacatgaagtcaaattatattgtcgaaattcatcaattcacaaatttggtagagcgttagaaaaaggtggatttgattttaataatgaaggtcatgaaacgtttgtaccttttacaaatattagtgatgatattgaatatgtattaaaagatgcagaagtgatacaagtagtgattccttcatcttacattgaatattatgcgaaagtgatgtcccattatataacggcggaacaaattattttctttaatatcgcagcagctatgggatcaattcgatttatgaatgtattagaagaacgtcatattaatattcaacctaaatatgcagaagctaatacccttacttacgggacacgagtagattttgaagaggctcgagtggatttatctcttaatgtaagaaaagtctttttctcaacatacaataagagagagttaaatgaatgttttgataaagtgagccaattgtatccacaattagtaaaagaagaaagtttgtggaaaacgaatctagaaaatggaaatcctgaagttcatccagctcctacactattaaatgtaggtcgtatagattatgcagatacatttgcattatataaagaaggtatcacaaaacatacagtgcgacttttacatgctgtagaattagaacgtctaactttagggcgtaaattaggatttgaattattaactgctaaagaagcgcgtattcaacgaggttatttagaacgtaaagacgaggatgaaccgctaaatcgtttatttaatacaagtcctgtattttcacaaattccaggaccgaactctgtagaaaatcgttatcttactgaagatatcgcatatggacttgtattatggtcaagtttaggacgtgaaattggtgtagatacaccgaatattgatgcgataattaccattgcctctactattctcgaacgtgatttctttaatgaaggactaacagtagaagaacttggtttagataaattaggattaaaataagtataatgtttggtatagaaaagaggtcttaagaaaaaagaaaaaggagcagatatatgaaaagaaaacccacatttctagaagcaatatctacaattattgtcatggtaatagttgttacaattggatttgttaaattcaatatccctattcaagtattgttacttatcgcttcaacctacgctgcttttattgctatgcgtgtcggtttaaaatggaaagacttggaagaaggaattacacatcgattgacaacagctatgcctgctattttcattattttggctgtaggtatcattgtaggtagctggatgtacgcaggcactgtacctgcattaatctactatggacttaagtttttgaatcctagttattttctaatttcggcatttatcatttcggctatatgtagtttagcaaccgggacagcttggggatctgcatctacagctgggattgccttaatatctattggaagtcaacttggtataaatcaaggaatggcagcaggtgcaattattgcaggtgcagtatttggagataaaatgtcacctttatcagatacaaccaatcttgctgcactcgtaacaaaagtaaacattttttctcatattagagcaatgatgtggacaaccattccagcatcaatcattggacttatcgtatggttttttgctggattaaactcccaaggtaatgtaaatacaaagcaaataaaagaacttttaaatgaactagctagtatttataatattaattttttcgtatggattcccttaattgtgattatcatttgtttaatactaaaaatttcaactgttccatctatgcttgtttcagcgttgagtgctattttgataggtaagtttaataatggatttaaatttgtagatggttttaaagcaacgtttgatggctttacatcatctatgactggtcattctcatgtcaccgaaaatgcaaaaacattgattgaacaaggtggaatgatgagtatgacacaaatcattgtgaccattttttgtggttatgcatttgcaggtattgtagagaaatctggttgtttagatgtaatgttacaaactgttgcaaaaggtgttaaatctgttggtaccctcgttcttattactgttctatcgtctctaatgttggtatttgctgctggtgtggcgtcaattgttattattatggttggggtacttatgaaagacatgtttgaagatatgaatttagatagaagtaatttatctcgtacattagaagattccagtactatggtcctaccattaattccttggggaacatcaggtatttactatgcgcaacaattaggagtttcagttgatcaattctttatttgggcagtaccatgttatttatgtgctatattagcaattatttatggatttactggcattggaatacgtaaaaaaataaattaaatgattaatttgctgtttaattcccctataatatggaaataacaaattaggattaaagtattgatgagaaacatagtagcgatgttatttaaaaaatacattaattttagatatcctaaaaaatgaattaaaagtggatttaatttttgtggcgagaattcaatccataataatgaatttgattaatatgataacttaaagcgttcgaaacactaaattaaagtaaagtttcgaacgctttttgtattatgcataaaaaaaagatttagaattcatattgaattctaaatcttttttctttatcaatttaattaatgaatgaaattatatgaagcagcttcacttgaagaaagtgtacgagatgttactacacctacaccatgaccataattcatttcagacactgtgattgaaccattactatttacattttcaacatatgctacgtgaccgtaagcaccagcagtagattgcataattgcacctgcagatggacggttatttactgtgtaaccagcagatgctgcagcatttgcccagttatttgcgttaccccaaatcgaaccgattttaccacctacacggtcatatacataatatgtacattggccagaagtgtagtagtttctacctgagctaacagagttagaaattgaaacacctgttgatgaaggtgcagttacagtagttacttttacattattattagaagtagaagcagcacctaaaccaccagtttgttgattacttgttgtgtaagattgtgttggattactagcaacttgatttgagttattagtattatagttgttataactataagttgaatttgtattagaataattattatatgtattgtagttataattgtaattatagttagaatgatttaaacgatctggactccagttacctttccaagtgtaatggtagttaccttgttgatcgatagtgtaagagtagctatatgaagtaggatcatttggattatatccttgttcagctgcatgagcttcatgtccttgtccggcgatagcaattgcggcaactcctgcagtagcgattgtagctgtagcgatttttttcattataaatttcctcctgagaattaaattaatattattttatatttaatagtcatttgttaacttagtctttaaatcattttacttaacgacaagaaatactttatcaaaaaaattacaatttgtggggaatgttaacgatttgtaatttttcgataatataaaagcttgtaaatttaattcttagtaatattttttaatataaaaaacgctattatgacagtatttatagaagaatatgaaaaagacattcattttcttgtaatctttttgtaaaataatagaaaaataatttataacaaaataatttagcctattgaattattacttgattaaataaatactaaaaaattattttatatgtcatccttatatataaataaagtaagtttatattgaaaaacaataaaatcatactataagataataaagtgataaaataagtcaaaatattgctactgctaataccgaaataaaacataaaattgtatatgaagatagatctccgatacgcatacataagtatcgaggcgataattcaatagaattaagtggtgaataaaggggagaaatgtcatcgcttatatctagtctttatattacaaacgagaggaaagacgtatgatagataatttttcggtaaagcttttaaaaaatacgagaatattaaaacaaaaagaatccaatatcaaacttatatattggttaaagggttctggaaaaataaatttagacttagatacatataatatgaaaaaaagagatctcgtatttattatgttaaatgatttatattcgatagaaggcgaaacgaactctgttattgcaataattgaaatttcattcacagattatttaagatttgcagacgattatattagacaaaaaggatataaattttcttctattgaacgaaaacaattagaatcatttattattaatcttcttgaatttgaaagtcgaaaacctcgacttccacacataagggataaattagttaaacatttatgtgtagaattaggttatattcaaagaaaacatcgtcaaaactataaactaaacaatccacttgtagatgaagttcatgaatatattatcgaacatcatcatgaaaagattaataaacaagcattagcgaattcacttgatatgtctaacaaagagttaagtcaagtgattaaatttcatacaccttatcataatattgctcaatatattaatgatattcgtttgaaattatgtttacttgatattttagatagtagtgaatttattcaagatattgcttataaacatggatttaatcattttccgagatttattgcattatttagtaagaaatatgggatgactccaggtcaagcacgaaaaaaacaatttgctccaatatataaggctaccgaaacggttgaaatatctttagattatgaagcacagttacttatagctgaggccaaaagtaactatcatacctaaaataggattaagtccattaataagtaaaaagataaagtatttagacctttactcatacttaatatgaagtaagtatatgtatgatataaagataaactggtaacactttaaaattgtatcgcaatactaaagtctgtcttctagaattgttgtataaattgcgaggtggcaactatcatgacgaaaaatgatatggatgtactattattttatcttttattttacaaagcagtcgatgaacttttaaaatattctaaaaacctaaatattgaacacctaaatgtactatatgctattattgattatcataaaacgaagcatcaaggtatggatattgaaacattaatgaaaaaaacgtatttatctaaacgaactttattccatcttgttagtcatttataccacgaaaattggatttttaaatcttatgatgcaaatgatcaacgaagattaagaatcttacctgtagaagtgtatgaaagaaaaatgaatcatttattattagaaattggagaattacttgaaaataactatcttaaaacatcaatcaagaatatgaattattgtaagttaacatatttaattactatttataaagttttaaataagattgaaaaaagtattaagcactatcagttaagtttaaatgatttgcttgttttaggcattatttggtcgaatcaaaatgacatctcgttgaaatcgataaactatttttcgcgttgtcagtctataaatataaatttagtaattaaacgattacaacaaagtggttatattttgaaagaaagagatgttatagatgaacgtagagtgtgtataaagttaaatatgtcaaaaaaggaagagattcattatatcttgagacattgtagtaaaatgataaaaaaggaattaatattataatttgttctaaaaataactagtgatgtaagaaagtcttgtctcttacattactagttattttaggtgtataacacatgaaataattatgtataatttaatttggcaaatgagattttaatatataatatcattttaatttcataaaaatattgaaatattatacttaaatgttataaaataatttttatagcataagaaatgtttagtgttgtagtagttagtatacatgaaccttgtagcaactagatgtacatcagaggagtggtttagaatatgggacaaattaaagacatcaatgatttagttaacgcaacatttcaagtgaaaaagttttttaaagacactaagaaaaaatataatctgaattatgaagaaatttatattttaaattatattgttaaaagtaaaaaagatgaaattacttcaaaagaaattgcaacgtattcagaattcaaaccttattacttaactaaagcattacaaaaattaaaagatttacaattattatcaaaaaaacgtagtatacaagatgaaagaacagttattgtttatgtaacaaaagagcaacgcgagagaattaatgctttaattgctgaattagagaaatatatacaatagaatgatgatggggtaaatgagtgagacagaatttctgtccactcttttttaattctaatatactatgttaatgagatactttatattattaaaaccgagtgttaaactatgattaaatatatcaaatatcgaataggtgatagtcatgttagattcatttttaataagtagtgatattcaaagaaaatggattaaaaaatttaaaacaattgaagatacatttaaacaaagagcagcagaagaagatattgactctaaattcccatttgacaatataaaatggcttgtagaggaaggttatagtgtgttaactttacctaaatcatatggtggagaaggtgcaacaatagaagatatggtcgttttacaatcgtatcttggagctatagatggtgctacagcactgtctataggctggcatctaagcgttgtaggacaattatatcaacaacatatgtggagtcaaactatgcttgatcaatttgcaatagaagtaaaaaatggtgcgcttgtaaatagagcagtaagtgaagcggatactggtagtcctactcgtggtgggagacctgctacgcatgcaataaaaactaaagacggatataaattaaatggtgtaaaaacgtttacttctatgagtaaagcattgacacattacattgttgctgcatttgtagaagatattcaagaagtaggcttctttttaattcctagagagactaaaggtttagaaattgcagataattggaatatgttaggaatgcgtgcaacggaaagtcatgatttagtattaaatgatgttatagttccgtttgaaaactttgtagaaacgaaacataaacctcagcccaatggatggattttacatataccaagtgtatatttaggtattgcccaagcagcgagagactatgctattgagtttgccaaaacgcattcccctaatagcattgagggaacaattgctacgctacctactgtacaacaaaatattgggaaaatggaatcactcttattatctgcacgtcattttttatggagtacagctagaggttacaatcaatataatgaaacacttaatatttggaatgaaacatctgcaagtaaaattttagtcatgaatcaaggattagaagtagtggatcttgctatgcgaatagtaggggcaaaaagtttagaaatggatcgtccattacaacgctattatcgtaatatgcgtgctggcctacataatcctcctatggaagatgcagcatatacgaatattgcaaaatctatacttgatttaatgtagaatgaattttttatttataatatgtttaaagaaagctatgattacgtataatgtagtcatagctttttttacatattttttggagggatttaatgactaaaatatattttaatcatgacggcggcgttgatgatttaatatcgctattcttattactacaaatggataatattgaattagtaggtgtaagtacaatcggtgcagattgttatttagaaccttctctaagtgcttcatgtaaaattataaatcgtttttcaaatttatctattgatgtagctccttcatatgaaagaggagttaacccttttccgaaagactggagaatgcatgccttttttatggatgcgctgcctattttaaatgaggaatggattgataaacgttctataacgagtacatttgaagcttatgaggatattattaatgtattaaataatagtaaagaaaaggtgactttattgtttactggtccgttaactgatttagccaaagcaatcaaatatgataaagcaatagtaaacaatattgaaaagttagtttggatgggaggaacatttttagaaaagggaaatgtagaagaacccgaacatgatggcacagctgaatggaatgctttttgggatcctgaagctgttaaaacaatatttgatacgtctatcaagatagaaatggtagcgttagaaagcactaatcaagtaccattgacaccagctattcgtcaaatgtgggcaaatcaacgtcagtttataggagttgattttttaggcatcagttatgcagctgtacctcctcttactcattttgtcaccaactctacttactttttatgggatgtattgacgactgctcaaattggtaaagaaaacttaacagattctatagaacttaaagtagatgtatgtacaaaaggaccaagccaaggacgcacatatgagagcgatgatggacgtatggtgcatgtcgttaatcatgtcaatcatgatgaattcttcaactatattacgtctttagctaaaaaagtatctcattaactttaaatgtaaactttttatataaaatagtttacataagtggtataattttcttcataaaaggaggaaatcaaatgagtacaaaaaatttagtatatacagcgttaatgacagcggttatttgtattttaggcctagtacccggaataccgttaccatttatgcctgtaccaattgtattacaaaatataggtatctttttagcaggagttatattaggacgtaaatacggcgcactcagtgttattatcttcttattattagcagccacaggtttgccattattatcaggtggacgcggtggaataggtgtgtttgcaggtccttcagcaggatttttattcttatatccagtagtggcgtatcttataggtttagtaagagatcgttttaaaaatcatattaatttcttgacattatttattggtatacttgtatttggtgttttattattagatattgtaggaacaatcattatgggattcattatacatatgcctataagtaaagcatttttattatcatttacatttattccaggagatattattaaagcgattattgcgagtttaatcggcacaacattacttaaccattcacgttttaagaatttgatataatagtacaaaatatacatagttgggtgatggttactatgacatacataacaatgaagcagattaaagaaaatggaaaaatatacttagaagatgagttgaatattatatatttaacaccttctgatccaatgacatatcacatgaataagtggcagtacaaaacgttaccttcaattaatcagtggtattcagatatggagaaacaacgaattttgcataaaaaacaacattcttctcatttatcttttacatttccagaaaaccaattactgcattctacatggttagaagcgatacgcaatgaaggatttcaattaggactacttgaattgtacgcgatagatagtgttacattaaaacaatttgagagcaatattcaggtagatattgaacctgtaacttcatttaacatggaagattatttaagtgtttacaatgaattttcaaaaccgtatggcgaagcgtttgttaaagaaagtgaagaacgaacgagagaggcaatattaaatcaaatagatgatgtcactcgtatagttgcatattatcttcataaacctgtggggattttggatgttatagttacagatgaaaccgttgaaattgatgggttcggcgttttagaagactatcgtcataagggaataggtactacgatgcagtcctatgtaggtcatttagctggttctcgacccgtcatattagtggcagatggtgatgatacagcaaaagacatgtatataaaacaaggctatatttttcaaagctttcaatatcagatagtcaaagaagatgcaatataaataaaagtagggagtgaaaaatgaatttataataaattctatttcactccttttacacgttctggatgactataaatattaaaagaattacctctaataaaaccaatagcagtaatatttaagtcatgtgccagtgttactgctaatgtggtaggtgcagattttgataatataacaccaacaccgattttagctgcttttagtaaaatttcagatgatatacgtccactaaaaataagcattttatttctaacaggaatttgatgagtaagacaaaaaccgtaaagtttatctaaggcattatgtctacctatatcttgacgatgttcaaaaaatgcctcaccatcactaatcgctgcattatgcaaaccacctgtttgtttaaataaagtgcttgcactttgtaaacctgtcatcatatttaaaatttgtcttggagtgagaatgatattagacatcgatgttttagcaattgccgcatcattttgaaaataaaattctcgactttttccacaacatgaagcaaccatgcgctttgtagaatactcaaaacgatcacttaatgacttagttaattctacatgagcaaaccctttactatcatcaatttgtaaatgtttaatttcttcttttttataaatggctccttcagatgctaaaaatcctatgactaactcttctaaatgtgtcggactgcagattactgtagcaaattcttttccattcaccataatcgttaatggaaattcggttacatagctgtcttcagtttcgatgagttgctcatcttcatacctaataattggttgattttgaacggcatctttatccatgaatgtctcccctttggttataactactttatactgtatcattatattcacaaaaagtatttcaatattgaatgattatataaaactttatattttaaaatttagaaataaatataaaacatggtaaaacttttcaaaagatataaaaagcgtataatatttgattgaatagggggcataaaaataaatgactgtaaaacgattattagcggtgttagggactttcattatcattatggcaggttgttcaaattcaaaagataatgagaatagcaagcaatcttcaaagtcaaataatagtgataatcctaaaactgaattgaaagtttcagcagcagcaagtttaagtgatgtaagtaaagcattaaagaaagagtttgaaaaaacacataaaaatgtaaatgtaacatttaattatggtggatcaggagccttaagacaacaaattgaaaaaggtgcaccaactgatgtctttatgtctgcaaatacgaaagatgtagatatgttgaaaaaacataatcaagctcataatacatataaatacgcacataatcagttggtattgattggtgataaaaacagtgatcaagcttcagtaaaagatttaaaagacaacgaaaaattagctattggtgaagtgaaaactgtaccagcaggtaaatatgcgaaacaatatttagatgatcaacatttatatagtgatgtaaaagataaaattgtatatgccaaagacgttaaacaagtattaaattacgttgaaaaaggtaatgctcaaatgggatttgtatatgagaccgatttatatacgaataatgaaagaacagataaagtaaatgagattaaaaaagcggatttgaaaaaatctatcacttatgaagcgggagcaacatcagataataaatttgctaaagaatggatggaatttttaaaatctaaaaaagcgaaaaatattttaaaagaatatcactttaaagtatagggggatgacatatgcctgatttaacacctctatggctttctattaaagtaggatttatcagtacgataattgtctctatattaggaatttttatttgtagaacgttatataaaagaaaggggcatgcaactcaatttcttgaaagcttaatattattacctattgttttaccaccaacagtactagggtttatacttattattgttttttcacctagaacatttgtgggacaattctttcaaaatatacttcatttacccgtagtatttacaatgacaggtgcagtaattgcatctgtcattgttagttttccactgatgtaccaacatactattcaaggatttcgaagtattaaccctaaaatgttaaatactgcacgaacaatgggagcaagtgaacgtaaaatcttctatcgtttaattctaccattatctaaacgttcaattattgcgggtattatgatgagttttgcgagagctattggagaatttggtgcaacattgatggttgcaggatatattccaaatacaaccaataccctgccacttgaaatctattttttagtagagcaaggaaaagaaaatcaggcatggttatgggtacttgtactcgttgctttttctattacagtcattagtatgttgaattttgcgaatcgtgataaagctcaggaggtagactagatgttacaagttaaattacaacatcagttaaaacaaacattgattcatattaacattgaagatacaaaagctaaaatatatgcaatacaaggtccctccggcattggaaaaacgacaatattaaatattattgcgggattaagacaaccagatgaggcttatattaatgttaataatcagttattagtagatactgaaaaccatattaatgtaaagattcaacaacgccaaattggctatttatttcaagattatcaactttttcctaacatgacggttctccagaatattacatttatgactaaacagtctaaacatattgatgagcttattcaacgtttaaatattagccatttaatgaatcaatttccgccgacactgtctggtggggaagctcaacgtgtagcactcgctcgaactttaagcacgaaacccaatttaattttacttgatgaacctttttcaagtttagatgatatttctagagatgaaggcatccatctagttaagcaaattcatgaggaatggtgtatacctattatttttgtaacgcattctaattatgaagcagaagtattagcagatgaaatgattcaaattaaataaacaggagtaggatatcgaagtctagaatgttttagatttctgtcctactcctatttcgttataataaaaagaagagagaatgttgagagaggtttcaaataatgactcaagaacgttattcaagacaaattttatttaaagatattggagaacatggacaacaaaccattaatcagaaacatgtattgattgttggaatgggcgctttgggtacccatgtagctgaaggacttgttcgtgctggtattcgagagttgactattgtggatagagactatattgaatatagtaatttacaaagacagacattgtttacagaaagtgatgcagatcgtatgttgccaaaagtgattgctgcacaagatcacttaaaacatattcgctctgatataaaagtgaatatttatattgaacatgtagatgcccaatttttagagcaatatgcaacgagtgtagatttgattattgatgcaacggataattttgaaacaagacaattaatcaatgatttttcctacagatatcgcattccttggatttatggtggagtagttcaaagtacctatgtagaaactgcatttattccaggtcaaacaccttgctttaattgtttaatgcctcagttaccagtgataaatctgacatgtgatacagtcggtgtgattcagccagccgtaacgatgaccacaagttttcaattacgggatgctttaaagatattgattggtaaacagattcccacgaagctgacatatggagatatttgggagaatacacatttttcttttggttatagtaaaatgcgtcgtgatgattgcccaacttgtggcaaaaatgctagctttccgtatttatatactcattcgacttcatatgcaactttgtgtggtagagatacagttcaatatgaaaataaagacattacaaaaaaagtattagttgattttcttatagcacttgatattcgttatcatgaaaaccaatatatgttagtatttgaatttaaaaaacatagaattgtatattttgaaggtgggcgaatgttgattcatggtacaactaagaaatctgaagcaatacagttaatcaatcaactatttggataaggagagaatgatgatgcatgagcatgaaaataaagaagttaaaaaaacaattcaatgtgcagtgttaacaatttctgatacacgaaataaagaaacagataaagggggtcaattagttcaaaagtatttgaaagaactgaatatagaagtgacagaagaacactataatatcattaaagatgacaaggaagacatccaatctcaaattgatgaatggttagcatcagatattgatgtcattataacgactggaggtactggtatagcacaacgtgatgtgactatagaagctgtaaaaccacttttagataaagaaattgaaggattcggcgaactttttagatatttaagttatacggaagatgtaggaacaaaagcgcttctctcaagagcattagcgggaactgttatgagtaaattaatctttacgttgccgggatcaactggggcagtaaagttagcaatgactaaactcattattccggaattaaatcatatggtttatgaactcaataaataaaatagtcataaaaagcattgtaaatcataggtttccctaattgaaaatgctgcttatgactatcataatagaagacaatcatatagattaatctaattgacggtgataatctccagatttacctccagattttgattcaaggtatgtgtcaccaatgatcattcctttatcagctgcttttgtcatatcgtatactgtgagagctgtaactgaagcagctgttaaagcttccatttcaacaccagtcttacctgtagtagaaaccgtagcagtaatgcttaattgatagtggcgttgtgtgttcgcttgattccaagagaattcaatatctattccagttaagggcaatggatgacacatcggaataatagtcgaagtatttttagcagccattatacctgcaatttgagcagtattaagtacattaccttttttatttgtattgtcaataatttgatggtaaatcgcttcattcactgtgatgcttgaatgcgctttagcaatacgttttgtaatacttttattcgaaacatcaaccatttttgcattaccttgatgattgatatgtgtgaaatttgacataaatagcctcctatagaaatatctaaaaatcataacatataaataaagttataatcatttatttttaataagtacatcattattttactgagtttataaaatagtatagcatgaatttatcgtgtaattggagttgataaaatggtagttgaaaaaagaaaaccaatacctattaaagaagcaattgaacgtattgtaaaacaagatatatatactccacaaagtaatatatcattagaggacagtttaggatatgtcttagctgaagacattgtagcaacttatgatataccacgtttcaataaatcgccgtatgatggttttgctataagaagtgaagattcggctggtgccttttcaaaaaatcgtaaaacatttaaagtgatagatcatattggtgcaggcacagtatctcataaaacagtcggagaaaatgaagcagttcgtattatgacaggcgctcaaattcctgagggcgcagatgcagtagtgatgtttgaacaaactgtggaaaacggagatacatttactattagaaaaccttttgaagagaatgaaaatgtgtcgctaaaaggagaagaaacgaaaacaggagatattgttttaaaaaaaggacaagtcattaatcctggagctattgcagtactagcgacctatggttatacagaagtgcctgtgtttttaaaaccaagtattgcagtcattgctactggaagcgaattattgaatgtagacgaagaattacaaccaggaaaaattagaaattctaatggtccgatgatacaagcattagctgataaaatgggattaacgatagagccttatagtatacaacaagatgacttagaaagtagtattcaagtcatcactaaagcaatgaaagatcatgatattgtcattactactggaggtgtttcggtaggagattatgactttttaccaaagatatacaaagcaattcaagcagaagtgttatttaataaaattgcgatgcgtcctggaagtgtgacaactgtggcagttgcaaataataagtatttatttggtttatcagggaacccatcggcttgttttactggttttgaattatttgttaaaccagcagtgcaacatatgatgcaagccaaagcagtttaccctcaagttgtgaaagcaacattaatggaagattttgcgaaagccaatccatttacaagatttattcgagcaactgcatcttttactcataattgtgcgactgtggttccatccggatttaataaatcgggtgctgtagtagcaatagcacatagtaatgcaatgattatgttgccaggggggacaaggggatttaaagccggacatactgtagatgttattttaactgaatcgaatgttttcgaagaggaactatcattatgattttacaaatagttggttttaaagattcgggtaaaacaacgttgttacaacaatctattacatttttaaaatctcaaggctatcatattgtaacgattaaacatcatggacatgataaagatgatattacgcttcaatcttctaatgtggatcatatgaaacattttgaagctggtgcagatcagagtattgttcaaggatctgcttatcaacaaacggtaacacgtagaaatcagccgtcgcttgaagagctgataaaagaaagtgtaactattcgttatgacgttattttagttgaagggtttaaacatgagaattatgacaaaatagtggtatatcagacccaagaagaattagaaaaactgagacttcttacacatgttcaatatttttataattataataatgagaatgctttaaacaactatgagcaatggttactaaaatggatgaaacaaaaggatgaataaaaaaatgaaacaatttgaaatcgtgacgaatccaattgagcccgaacaatatagaacatttactttaaatgaacatcaaggagctgttgttgtctttacaggtcatgttcgcgaatggactaaaggggtgaaaacagaatatcttgagtatgaagcttatgttccaatggctcaaaaaaaactagaacaaattggagaagaaattacacagcgttggccaggaacgataacaacgattgtacatcgtattggtcctctacacatttccgatattgcagtattgattgctgtctcttcgccacatcgtaaagacgcctatcgtgcaaatgaatatgcgattgaaagaattaaagaaattgtgccgatttggaaaaaagaaatttgggaagacggtgcagaatggcaaggacatcaaagaggagaccacagtcaagcaactaaaggaggggcttaaatgagagtattatattttgcagaaataaaagaaatattagaaatgaattcagaggacattgatttaatagaagatattacagtagaaacatttaaagaattattatttgaacgtcacccatccattcgtgataaaaaatttcaagtagctgtgaatgaagaatttgttcaacttaatgatattgtaaagcaagatgatattgttgcgttaatacctccagttagtggtggttaaatatgaaagcaattattctagctgggggacactctaaacgttttggtagtcccaaagcatttgcttgtattcacggtgaaatgttctataaacgaattattaatacattaacagaaacgaatttatttgacgatattattatcagtacaaacaaacaacttaaaaatgaatttgagtataaacagattatgatagatgaagaaacacatgcagataaaggcccgttatcaggaatctacacagttatgaaacattataataatgaagaattattttttgtggtttctgtagatactcctatgattactaaagaagcaataagtcaactatatcaatttacaatttcacagcgtatggaacatcaagcagatattatagcttattcagacaatgataaacctataccgaccattgcgttttatagtcgaggagtcatttcgaatattgaaaaagcactcaattctaatgattatagtttacggcatgtatataaaaatgtgataacatgttttctagatactaaagaggttcagcctttaaaaaattggtctaaaaatattaattatcaagatgatttgaatactttacttcatcagattaatgattaaagggggacgcgttaatgacgatccaaattaaagacaaattaggacgtcctataagagatctacgaatttctgtaacagatcgttgtaatttcagatgtgattattgtatgccaaaagaaatatttggtgatgattttgtttttttgcctaaagaggaattactgacatttgatgaaattacaacaattgccaaagtttatgctgaattaggcgtgaaaaaattaagaatcactggtggagaacccttgttacgacgtgatttatataaattaattgaaaaactcaatcgtattgagggtattgaagatattggtatgactactaatggtttacttttaaaaaaacatggtcaaaagttgtatgatgcaggattacgtagaattaatgtaagtttagatgcaattgatgatgaggtatttcaagcaatcaataaccgtaacattaaagcttctaccatcttgcaacaaattgattatgcggtctctattggatttcatgtaaaagtaaatgtagttatacaaaaaggaattaatgatgatcaaatcctacctatgatcgaatattttaaagataaacacattcaaataagattcattgaatttatggatgtaggtaatgataatggttgggattttaataaagttgttacgaaagaagaaatgctatctactattgaagaagagtttgatatagaaccacttccacctagatactttggtgaagttgccacatattatagacataaagataatggtgcacagtttggtctaatcaccagtgtttcagcttcattttgttctacttgtacaagagcaagactatcatctgatggaaaattttatggatgtttatttagtgtgattgatggttttgatattaaatcattattgcgtagtggtgctacacatcaaaaattaaaagacacgttcatttcattatggcaagcacgtgatgatcgttattcagatgaacgtacagaacaaacagtaaaaaatcgacaacgaaagaaaattaatatgaattatattggtggttaatctatacagaagtaagtgataatcatatgtgatattacttacttctgtattttaatttgatagtagctttaattaattttaataatttcaaagtaatttatattaatcactaaacagatataaattaatatttgtaatagattaaattgtacatatgttatataattaaattaagcaattttattatattatgtatttatacaacttagaatcaactttggaggcatgtactatgaataataaagtgaatcgctttattgaagcggaaaaagaactcagtcaactaaaacattggttaaaaatgacgtataaaatttctattgaggaatttgtcgttttatttaaagtgtatgaaggtaaaaaaattagcggaaaagagttacgcgatacattacattttgaaatgttatgggatacaagtaaaattgacgtaatcattcgcaaaatttacaagaaagaattaatttctaaattacgttctgaaacagatgaacgacaagtattttatttctttaatgcgtctcaacaaaaagtattagataaaatgaaaaatgaaattgaagctattagtattgcaaattaattaaataaaaagagcacctctcatattctataacgaataataggggtgctcctttttacatattaaatgaaagattaatacgtattaccatgtacttttctaccatgaacaattaaataaagtactgtacataaagcagctacaatagccataatgagataaacttgagtatacgtgattgaatctgtaaataatccaagcaacgatggaccaaagccaataccaatatctaatcctataaagtaagttgaagttgcaattccatatttacttgaaggggagactttaattgcaatggcttgcattgaagaagagaggtttccataaccaatacctaagaacacgccagcaagtaataatacccaaccattgtagctaaatactaataaaacaaatgtgataattaaggcaagaaaagctggataaaccacaacgttttcattttttgcatcaatcattctaccagcaataggtcgagtgattaatgaagcgaccgcatagaaaataaagaaataactagatgcttctaacaaatgacgttgctcagcaaaaggttttaagaatgttaggattgacgcataatttaacccgatgatcatcataacaattgctactggtacagcttctttagcaataaaattatgaatattgaaaccagaagcttgagctacttttctatcaactgcatttttagtaggattaaaatcaattttaataaagagtgaaacaattaaacttgcgattcctagtatgagacagataagaaatagtaaattaattgagaatgatttcaataataaaattccaaagaaaggcccaatagctgatccaagaacaaggctcagtgaaaataagctaataccctcacttttacgttctacaggggtaacatgtgcagcaattgtacctgtagctgtcgttgcgatagctgtagcaattccatttaggagtcgtacaaacatcaagatggttatcgacccagagataaaataaagtaactgagtaatgattagaaaaattaaaccaacaattaaaatttttttaggaccaaaacgattgacatactttcctgttccaaaacgtcctattaatgatccaataataaatagtcctacaacaagtccagatatactgtctgacacatgataggatgttttagaataatcagcgatgataactaataataagtacatacataaataaacaaagaagttaatgataaaattgattgtaaaacttctagtaaaaataggttgtttaatagtactagtctgattcatgagtatcccccttcgataatgtggtatgtaattttttcatgattgctatgacgtgatccaagtcatcattagatatattagattgatggattaaatcttcttgaataggtgtaatacaagcattcatgtcctcaaataattgctgtcctttttcagataaacttaatagcttttcacgtttgtcagtacctggagtaaccaaaagtaaatctttttcaaatagaactttaataattttacgcgcagtcggtttttcaataaaacgacgtttagatatttgaactaaagtcgtttgatcatatgtagcaatatctttaagcactaaccactgacctgtatgtagaccaaattgatctaatataggttgagtacgtttaatataaggacgataaataccaataaaactattaaaaaattcatttgtgagcattttaaattgtctccctcgaaaatagttagcaaggctaactaattaataccgaaaattattatacgctgatttcattcgtttttcaacactaaatataagttatagagtaaagtatagtgaaatttgttaaaatacaattaagtttaaattagtaaaggggatattgatacatgaaattgaaatttgatcatatgattcattacgtcgatcaattaaaaggatttaaatatccaggtgagttattaaaaattcattctggaggcaagcatcatcaatatggcactttcaatcgtttaacttatataaatggaaattacatcgaacttttagatgttgaaaatgtcgaaaagttaaagaaagaagctaaaactgaaaagggtagagtcgcttttgcaacgaaaattgttcaagataattttaagcaaggatttaaaacaatggcatttagaacggaagatatagagagagtaaaacaatctttaaacgaacgtcatattgatacgattggtcctataaatatggacagagaaaataaaaagggtgaaaagataagatggaagttactctacatcgctgatcccgactatatggtaaggcctcctttttttattgagtggaataaaaataaagtcgatcatatgcaaaatttggattcattttttcagaaacaatttaaaattgataaaattattatagatagttctaaacgctctaaaaccttaactaagtggcaaagctggtttaatatggatattatagaagaaaatgagaactacactgatttaaaattagagggggacactattgtttatcggattcaagatgcggctcaatctggatacaataccattgtttttaaagataatgagactatgactccttattcaatcattattaaaggagccaaatatcgtttcgaacctaatgaaggaactaattaaatagataggtataagtactatgtgcaataaaagcaatatgaataaaaactagtactaaagaaattaagcttagtattaaagaaaaacgatttgtttttaatagtataaataaaatggtaagtacaagtgataaagcgacaaacatcactctcagactaaaaaaatttatagttaatggatgagccattgtataaattattgcaatagcattacatacaataaatataagtaaaataatatttctcaattttaaaaacctctttaataaaaaatagtagtgtttttcattcattaagtataacaaaaagaatagctttttgaagaaaatacaacttctattatgagtttgtcgacactctcaaatctacaatgtataatgataagtaatgcaaagataaaggagttttatatagcatggaaaagatgaatatcacaaatcaggaacatgacgaatttgtaaaaactcatccgaatggtgatttattgcaactgacaaaatgggcagagacaaagcgcttaactggatggtattcaaaacgtgtggcggtaggtgaaaatggtaaaattaaaggtgtaggacagttattatttaaaaagataccgaagttaccatttacattatgctatgtatcacgtggattcgtagccgattataatgatagagatgtactgagagcacttttaaatgaaacaaaaaaaatcgctaaagaagaaaaagcgtatgcgattaagattgatccagatgttgaagtagaacatggcacagaagcacttaaaaatttaagaatgcttggatttaaacataaagggtttaaagaaggattatcaaaagactatattcaacctcgtatgacaatgattacacctattgataaaactgatgatgaaattattcaaaactttgaacgtcgtaaccgttctaaagttagattagcgcttaaacgaggtactaaagttgaacgctcaaatcgtgaaggacttaaaacatttgcgaagttaatgcaaattacgggtgaacgtgatggtttcttaacacgtgatattagctattttgagaatatttatgactcattacatgaagatggagatgcagaattattcttagtgaaattagagccacaacaagtgcttgatgaaacgaataaagatttagaagctcaagaagcagaaaaagctaaattagaagcgaagtcagaagcacgtccaaatgacaaaaagacagctaacaaattaaatgatataaaaaataagatttctaagacaactgaattaaaagaagatttagaaagattaaatcaagaacatccagaaggcgtatatttatcaggcgcattacttatgtttgcaggtaaaaaatcatattacttatatggagcttcttcaaatgattatcgtgatttcttaccgaaccatcatatgcaatatgaaatgatgaaatacgcaagagaccatggtgcaacaacgtatgactttggtggcacagataataatccatcaaaagattctgaacactatggattatgggcttttaaacgtgtatggggcacttatttaagtgaaaaaattggtgagtttgattatgtcttaaatcaaccgttatatcaattaatcgaacaagttaaaccaagacttacaaaagccaaaattaaactctctcgcaaattaaaacgtaaataattaatttacagtattgtagatacagtatttaatctgaacgattctatgaagaaacgttcagatttttttaccaatattaatcacttattataggagaagtaacaaaatgattaaaaagatgcttcaattttcattaggtaataagtttgctatttttttaatgattcttttagtcattataggtggcatatattcaagtgctaaacttaaattagaattattacctgatgttgaaaatccaattatttctgtccaaacgacgatgtcaggagctacacctcaaacgacacaaggtgaaattagctcgaaaattgataaacaagtcagatcactcgcttatgtaaaaagtgtagaaacacaatcgatatctaatgcttcaattgtgaaagttgaatataacaacggaactgacatggataaagctgaagaagtactgaaaaaagaaatagataaaatcgattttaaggatggagtaagtgaaccagaattaatacgtaattccatcgacgcctttcctatcgtagcttactcatttacaaatgaaagtaatgacttaagaactactacaaaggaaattaatgaacaattaatacctaaacttcaaactgttgacggtgttcaaagtgcacaactgaatggacaaactacacgtcaagttactttgaaatttaaacaaaaagaattagataaagtagggttatctgcggatgatgttgaaaattacattaagacagcgactagagaaacaccactcggtttatttcaatttggaaataatgaaaaatctctcgttgtggatggtcaatttaaatcagtcagtgcattaaaaaatttaaagatccctctttctatagcaggtcaaggacaatcaagcgattctaacgataatagtattagcagtactggccaagaggacagtcaatcatctagttcaagtcaatcgcaagcgaatagctctttaaaagaaacaaatggtcaaatgccaagcgtgccacttaaagatttagctaaaatcactgtgggcgatgaacgagattctatttcaaaaacaaatggtaaagatgcagttaacgtacaagtaatgaaagcacaagatgcaaatacagttcaagtggctagagcaacgcaaaagaaaatagacgagtttgttaagaataacagtgatatcaaagccacaaaaacaatggacacagctaaaccaattgaagattcattatatactatgattgaaaaagcggccttaggtaccatcgtcgcaattattgttattttattattcttaagaaatattaaaacaacagcgatatctatcgtttcaattccgttatctattttgattgcacttattgcactgaaattaagtaatgtatcacttaatattttaactttaggtgcattgactattgcgattggtcgggtcatagatgattctattgttgtagtagaaaatatctatcgccgattatcagatccaggtgaacaattaaaagggaacaatttagttattagtgcaacgagagaggtatttaaacctattttatcttctacgattgttacaattatagttttcttaccgctagcttttgtttcaggctcagtaggtgaaatgtttcgaccatttgcgttagctatcacatttagtttactggcttcgcttcttgtttctattactgttgtaccagctcttgcctcaacgttctttaaaaatggaataaaaataaatggcaatgttaatgaagaaaataaattagggagaattagtaaggaatataaacgagtactgggttggtcacttaatcataaatggcttgttcttattattagtattgttatattaattgcgagtataggaattggtgcaactaagttaggaacaagttatatttctactggagaagataagttcttagcgttaacttatacacctaaaccaggagaaactgaagaagcagtacttaaacatgctgaaaaagctcaaaaatatcttcaaagtaaagataaagttaaaacagttcaattttctgtaggtggaccttctccagcagatccaacaggaagcacgaatagcatggctattatggtggaatatgattcgaatacacctcactgtgaggaagaaccagataaagtggttacacatctttctaaaatgaaagacccaggtgaatggaaaaatcaagacttaggtacaggagctggaaacaattcagtggacgtaactgttaaaggaccttctactgatgcaattagaagtacagtaactaaagttgaaaataaaatgaaatccattaaaggtgtagtagatgtcaattcagatttatcacagacctatgatcaatatgaaatcaaagtagatcaaaataaagcaacagataaaggtatttcagctgcacaattagcattgaatttaaatgagaacttaccagaaaaaacaattacaactgttaaagaaaatggtaataatatagatgtaaaagtaaaacagaataaacaaacaaattggtctcaaaataaactagaaaacattgacttacatgcaccaagtggagaaactgttaaattaaaagatatcgcacgtctaaacaaaacaacaacaccaagtaaacttgttcaaaaagatggcgattatgctacaacagtttcaggtaagattaccgcttctgatgttggtggaacctctagtaaagtgatgcgtgaaatcaatacaattgataaacctaataacgttaagtttaatgttggcggtgcaacagatgatattaatacagcaatgagccaactcgcttttgcaatgcttattgctattgttattgtgtatcttgtgttggttatcacattcaaaggtggtttagcaccatttacaattctattctcattaccatttacagctattggtatagtatttgcattattgattaccagagaaaccatttcagtaccaagtttaattggtatgttgatgttaattggtattgttgttacaaatgcaattgtattaattgatagagtgatttcaaatgaacatcaaggtatgttaatgaaagaagctttaattgaagcgggtggaactcgaattagacctattttgatgactgcagttgcaacaatcggtgcattattaccattgttatttgggcaaaatagttcaattctaatttctaaaggaatggctgctacagtcataggtggattagtatcatcaacactactaaccttaatcgtagtgcctgttatctatgaaatactctttactttaaaaaacaaacttacacgtaaataaagataaatttaggataagtcaaaaaaagcaattgagacgtatgcacatacgttcaattgcttttttattaatacatagtaaaagttaaaataatatatattacaaaaataatgatagatataatatttaaaatcgaaacacctttatgatcgtttttaagtgctttaaaagctgtaacttctacatttcctacaagaagaagcaatacaacaaatacccaccaattttcactaggaaattggatcgtagtgatagctactacaaataataataatattcccataataatacgtaaaatatgtacgaacattgatttcattttaaaaatactgatataacttacaataagatacagtatgggtaataaaattaagtatattttcacttgatgacatcctttctattacgactaatatcatagcattcatgaactttaatgcctagatatattgaaaaattatttctgacgtaattttgaacgtatgtctgaaatttctttttcaatttcttctaattgttttactaaaggatcaatctgttgatttagtgattcttttttctctaaatcattttgtaaacgaatataatcgtatttaagctcagctaattgtgattctaattccatgtctagtcgaactccttatttattaatatgattagtaatgattatagcatgaaacaagtaacttctaaaaatactgttaattgtgttagagtaattagttgtaatggaatattagggaagaagggatgaattgtgactgagcaatttataatcattattttgttaattgcattaggttacttacttaaacgtattaactttattaaatctgcagatagtcaagtattgtctacgcttgtattgaatgtcacattaccttctttagttattgtcaatttaaatagtgcgaatcttgatttatcattttctattttaccaattatgatgctcatctatggcatattagccaaagtaattatggttgcattatttagaaaatatgataatcatgtcaagggttcagtaggtatgatggcagcgtcattaaacattggtttatttgcttatccacttgtagaaacaatttggcctaaaaatggtatgatttattttggtatggctgatatcggtggggcaattattatgtttggagtcacttactttgtaggtagttattacagtgaaggaagcgatcaatttaatttcaaatttttagggaaaaagttaatttcttcaataccactcgttacttatattgtaatgtttatacttaatatggctaatattcatttaccaaaagcttcaattgacttttttacaataatttctaaagcgaacatgccattatcaatgattttacttggaattatgttgagcttcagaattgaaaaacaatttttaccaattgcagtgaaatatttaattgtccattacggacttggatgtattgctggtttattagtccactttttcttaccaacatcagatgatatgattaaaacaacattattaattacatggttacttcctgtgggtgtggcaattattccatattcaattcaatttaaatataaaacattaccgttagtgggaatggttactaatatttctattgtgataagtattattattatatatatttatcaagctatctttgtataaaaactacatatacacatgaaaaaagcaagcgatttttaatcatcgcttgctcttttactttatagtatgattacccttttccacccataaatgcaggatagttcatcataccaccatcaacatataatgttgttccatgaacatagctagctaaattagaagctaaaaacaatgcaccgtttgctacatcttttgcatcaccgatttctctagctggaatcatttctaatgtttcggcacgtgtttttgaatcagagaatttttcttttgtatgctcagtcacaacggcacctggagagatattattaatacgaatgccatgttgggcatattccattgacattgtttccatcattaacttaagaccgcctttacttgcagcatagttaacgtaatttggccaaggaattgtatcatgcacgcttgaagtattaataataatacctttcttatcttcttttaaaaattgttttaccgcttcacgtgaaccaataaatgcacctgttaagttaatatcaaggactttttgccattcagccatagacatttcatgacttggagtggctttttcaaaaccagcattattaatcatgatatcaattgttccaaattctttaacagccgtttctactaatcgtttcacatcttcttcgactgaaacatcggcttgcaccgtaattgagtcaccgccagattttttgattgtttcttgaagggcatcaagttcttccatatgactttctgatctataatttaagactactttcgctttttctttaccaaaaacttccgccattgcttttcctatgccactgccagagccagtaataaccacaactttattttctaattcagaaaacattgtataacctcctcaatatacctattttaagtttcctaatataatggctgcgataataatcaacgcaatacctgaccaaatcccaatcatttggcgtcgatcttttttctcacctaataagaatataccaccaagagtagaaactataactaataattgtgataatgagaaacttgttgctacaccaactttaggttgagaatagaacataaataagttacctattccccaaacaatccctggaataatattaagtgtggtagatttaatatttgtttcatgtctcattgaaagtaaaaatccaccaatagccataccaactgattggaagaataaggcatcagtaccatttacgccaaatatattgccgattactacataacctacataacctaatgtacctaccactagaattaccattgctttactaaaattaggatcttttgtagaacgctcattttttccttttagtgatgtaagtgcaatccctgttactaataaaaccattgcaataagtcctaacgtaacttgtaatccagtactccattcacctaaaaagatagcactaaataaagttgtacctactaattgtaaaccagtagaaataggcattgttttagatacgccgacaaggttaacagattgtaattgagttccttgaccgaatgcccacattgcaccagaaattaaccctacaatgatgacagtagggttatcaaattgtgcatgacctgtaagaagtaagattagaccaataaccaatgtacctaacgttgtacctctaatttgattgtatggacctcctcctacaaatacattgattaatacgagacttccccaaaataatgcaggtaataaggcgattaatatgttaataatctgcatttattactcactctccttttcaaaaataagtgctttcctttccataacacttggtaaatattttatattatttgtgattgatataaaacgcaattgctcattttttataaaatataaaagactaatattataaaaatgtatagcctaagtattttagtaagctgaatttaaatataggggttttactttaaattaataagatgagatggaaagtaacactattgctatacatgttacaatattaaacgtatgaaaataaaaagtaagaatgtgaaaggaaatttgaatgaaatcattaattctagcggaaaaaccctcggtagcgagagatattgcagaagcactaaatattaaagaaaaacataatggatatatttcaaatcagcgctatatagtgacatgggctttaggtcatttagtaacaaatgctcaaccagaacattatgacaaaacatataaagaatggaaattagaagatttacctatactacctaagcaaatgcatactgtggtcatagggaagacaagtaaacaatttaaaattgtaagatctttaatattaaataaagatgtgaaaaacattattattgctacagatgctgggcgtgaaggagaactggtagcacgtctcatcttagataaagtaaaaaataaaaagccaattaaacgtttatggattagttcggtgactaaaaaagcaatacaacaaggctttaaacatttaaaagatggtcgtgaatataatcacttgtatcaagcagctcttgcacgaagtgaagcggactggatagtgggtattaatgctactagagcactgacaactaaatatgatgctcaactttcattaggaagggtacaaacaccaacgattcaactggtttatcatcgacaacaagaaattaatcattttaaacctcaaaagtattacacactttctttaaatgtaaatgacgctacatttgatattcaaactaataaaagatttactaataaagaagaaatacaaaaattatctgaaaaaatagaaggacaatcaggtcagattgaagatgtttcaattaagcaaaaaaaatcttacgcaaaacctttatataatttaactgatttacaacaagcatcttaccaacgatttaaaataggacccaaagaaactttgaatattttacagagtctttatgaacgtcataaattattaacatatccaagaacagattctaactacttatctaacgatatgacagataccatacaagaacgtctccaagccttattagcgactgattataaatcacatgctcgtcagttaatgactaagtcatttacaactaagatgcatatttttaataatcaaaaagtgtcagaccatcatgcgattattccaactgaaattagacccaactttgatacattaactaacagagaaacaaaaatatatttaatggttgtacaacgatttttagaaacattaatggatccttatcagtatgaagcgacacaggttattttaaaagtgggagaatatcaatttaaacatgccgaaaacgtcacacgtaaattaggatttaaagcacttagtaacaatgattctacttctaataagactatcacttttagcaagaatgaaacctatcgtgtacaacaagtcaaagtaagcgaacatgaaaccacaccacctgaatatttcaatgaaggtagcttacttaaggcgatggaaaatccacaaaattatattcaattgaatgacaaaaagtatgctaatacccttcataagacgggaggaattggaacagtagcgacgcgtgcagatattattgaaaaactattcaagcttaatgcaatagaatcaaaagatgggaaattaaaagtgacatctaaaggaaaacaaatattagagctttctcctaaagcactaacttctcctttaatgactgcggaatgggaagaaaaattactttctattgagaaaggtaaatataatgctaaacaatttattaatgagatgaaagattttactaaaaaaattgttggggaaatcaaacatagtgatcaaaaatataaacatgataatttaacttctactgaatgtccaaattgcggtaaatttatgataaaagtaaaaactaaaaacggacaaatgctagtgtgtcaagatcctacctgtcatactaaaaagaatattcaacgtaaaacgaatgcacgttgtcctaactgtaaaaagaaaatgacattgtttggaagaggaaaagaagcggtctaccgatgtgtatgcggtcatactgaaacacaagcacaaatggatcaacgattgaaaaataaaaataatggtaaagtttctaaaaaagatatgaaaaaatatatgaataatcacgatgaattggataataatccttttaaagatgcattaaagaacttgaaactttaaataaaatcgaacttataatgaaataaatcgataaaagttcgtttttagtattgtttttttaagtaagtaatattaaactattaaagtattttaaaaaaaggagtttaaagctgtgaaaaaatacttccaattcgacgagtatggtactaactacaaaagagaaatcatcggtggtatcacaactttcttatcaatggcttatatattagccgtgaatcctcaagtcttaagtttagcaggtgttaaaggtatatctggggatatgaaaatggatcaaggtgccatttttgtagcgacagcattagcagcctttgtaggatctttattcatgggactaattgcaagatatccgattgcgcttgccccagggatgggattaaatgcgttctttgcatttacagttgttttaacaatgggaattccttggcaaatcggtttaacaggtgtgctgttttctggtatattctttgcgatattaacagcaactggattgagggaaataattattaatgcaataccctatgaaatgaaaatggcagtttcggcaggtatagggctatttattacttttgtaggtttacaaagtgcaggtattattgtaaaaaatgattcaacgcttgtaacattaggtcatctaactaaaccatcagtacttttagctatatttgggattgctataacaatcattttatatgctagaaaggttccaggttcaatctttattggtatgattataactgcaattgtagggatgattacaggtcaaattcatacaccatcaggtattgtaggtaaaattccaagtattacacctacatttggagcagcttttgaagcatttaaagatccaggccaattatttaccatccaatttcttattgttattttaacgttcttctttattgatttctttgatactgcaggtactttagtagcagtagcaacccaagcaggtataatgaaagacaataagttaccaagagctggaagagcattatttgcagactcacttgctacaattgttggggctatttttggtacaactacaacaacctcttatattgaatctacttctggtgttgcagtaggagcacgtacaggttttgcaagtatcataactggtttttgtttcttattagcattattctttagtccgctaattgaagtcgttacaagtgcagtaacaacaccagcgttagttgtagttggtattttaatggcggcaaactttgctgaaattaattggaaaaaatttgaagtagcagtaccagcatttattacaatcattatgatgcctttatcatattcaattgctacaggtattgcatgtgggtttatcttctatccaataacaatgttaattactaaaaaacataaagaagttcatcctatcatgtatgtattaatggtattatttattttatacttcgtgtttgtacacggttaaacataaaaagacacatttaattcaaaaattaaatgtgtctttttaatattgaaattattaattgtttttatcatctttgtattgagtataaataactttagaatctttatttggaatgtaagttggtgcgttgagcacaacaaatataaagaataccattaagaaaaagagtacccaatgcgtaaacataccaataataggtagaaaagcaacaaatgatccaattaatccaataaatgggatcattgccataggcttaattgtattttgagaatctactaatagaatgatgcctaaaataagataaagtaaagcatttaataacaaaggttgccaaccaaagctaagaataactgtgcctcctaaaaaaggaataccatagaaaaattcgctagctattaagaaaatactaatgattgataaagtaagtttcacatttcttttcatttatataatattcacctccgataaagttcatgaattttaaaataattaacattaaaaatatatagttgcaatttcaaaattcattactctctatatctattataaaggtttatagaaaaaaggggaaaaatttactcaaaatggttgaactacataaaaattttcagtaaaataattaagtatgtgttagacgtaaataaaaaagttaaagaaaaaccttgatttattagtgtttttcttgtaacatatttaatgttggacttgaagaaagcgatgaagcgaaaggttactgacacacccggccgctttgccatggcgttgtgtgagatagttttcgtggagaagtctatcacttcaatgtagacgaacaaggagggaaaattatggcaaaacaaaaaatcagaatcagattaaaagcttatgatcaccgtgtaattgatcaatcagcagaaaagattgttgaaactgctaaacgttctggtgcagatgtatctggaccaattccgttaccaacagaaaaatctgtttacacaattattcgtgcggtgcacaagtataaagattctcgtgaacaattcgaacaacgtacacataaacgtttaatcgacattgttaacccaacaccaaaaacagttgatgctttaatgggcttaaacttaccatctggtgtagacatcgaaattaaattataatagatcaatttaggaggtggactttcgatgaccaaaggaatcttaggaagaaaaattgggatgacacaagtattcggagaaaatggtgaattaatccctgttacagtagtagaagcaaatcaaaacgtagtattacaaaagaaaactgaagaagttgatggctacaatgctatccaagtaggttttgcagacaaacaagcatataaaaaagatgctaaatcaaataaatatgcaaataaaccagctgaaggtcacgctaaaaaagctggcgcagcacctaagcgcttcattcgtgaattcagaaacgttaatgttgatgaatacgaagtaggtcaagaagtcacagtagatacttttgaagctggagacattattgatgttacaggaacttcaaaaggtaaaggtttccaaggtgcaattaaacgtcatggtcaaggtcgtggaccaatggctcacggttctcatttccatagagctccaggttcagtaggtatggcttcagatgcttcaagagtatttaaaggtcaaaaaatgcctggacgtatgggcggtaacacagttacagttcaaaacttagaagttgttcaagttgatactgataacaatgttattttagtaaaaggtaatgtacctggacctaaaaaaggttttgtagaaattaaatcttcaattaaaaaaggtaataaataataagtagcgaaaggaggaaaaagcataatggctaattatgatgtattaaaagtagacggatcaaaatctggttcagttgaattaagcgattcagttttcgcaatcgaaccaaacaacagtgttcttttcgaagcaatcaatttacaacgtgcttctttacgccaaggtacacatgcagtgaaaaatcgttcagctgttcgtggtggtggacgtaaaccatggagacaaaaaggtacaggacgtgcacgtcaaggtacaattcgtgctccacaatggcgtggtggtggtatcgttttcggaccaactccaagaagctattcatacaaaatgcctaagaaaatgcgtcgtttagcattacgttctgcattatctttcaaagttcaagaaaacaactttacaatcgttgatacttttggctttgatgcaccaaaaacaaaagaattcaaaaatgttttaactacacttgaacaacctaaaaaagtgttagtagtaacagaaaacgaagatgtaaacgttgaattatctgcacgtaatattcctggcgtacaagtaagtacagctcaaggattaaacgtattagatatcactagcgctgacagtgtaatcattactgaatcagctgcgaaaaaagttgaggaggtgctcggataatggaagctagagatgttcttaagcgccccgtaatcactgaaaaatcttctgaagcaatggctgaagataaatatacttttgacgtagatactcgtgctaacaaaactcaagttaaaattgcagttgaagaaatcttcgacgttaaagttgaaagtgtaaatattatcaactacaaaccaaagaaaaaacgtatgggccgttatcaaggctatacaaataaaagaagaaaagcgattgtaaaacttaaagaaggttcaatcgacttattcaactaaaataaaataatattaccattaaggaggtaagcgacaatggctcttaaaaaatataagccaattacaaatggtcgtcgtaatatgactacgttagacttcgctgaaatcacgaagactacacctgaaaagtcattattacaaccgctaccgaaaaaagcgggtcgtaacaatcaaggtaaattaacagttcgtcaccatggtggaggacataaacgtcaatatcgtgtaattgacttcaaacgtaataaagacggaatcactgctaaagttgattcaattcaatatgatccaaaccgttcagctaacattgctttattagtatatgctgatggtgaaaaacgttacattatcgcaccaaaaggattacaagtaggccaaacagttgaaagtggtgctgaagcagatatcaaagttggtaatgctttaccattacaaaatattccagttggtactgtaattcataatatcgaattaaaacctggtaaaggcggacaaattgctcgttcagcaggtgcaagttcacaagtacttggtaaagaaggtaaatatgtattaatcagattacgttctggtgaggtacgtatgattttatctacttgccgtgctacaatcggtcaagttggtaacttacaacatgaacttgttaacgctggtaaagctggtcgttcaagatggaaaggtatccgtccaacagttcgtggttctgtaatgaaccctaacgatcacccacacggtggtggtgaaggtcgtgctcctatcggtagaccatctccaatgtcaccatggggtaaaccaacgcttggtaagaaaacacgtcgcggtaaaaaatcatctgataaacttatcgttcgtggacgtaagagaaaataataacaacttatttgagtgtgcggcttaacagctgcacgcacacaataagaagggaggcgcccaaatggctcgtagtattaaaaaaggacctttcgttgatgatcatttaatgaaaaaagtagaagctcaagacggaagtgaaaagaaacaagtaattaaaacatggtcacgtcgttctacaattttcccaaatttcatcggtcatacttttgcagtatatgatggtcgtaaacatgtacctgtttatgtaactgaagatatggttggtcacaaattaggtgaatttgctccaactcgtacatttaaaggacatgcagctgacgataagaaaactagtagataataatatatataagtagaggaggatatcctaatggaagcaaaagcggttgctagaacaatcagaatcgcacctcgtaaagtaagattagttcttgacttaattagaggtaaaaatgctggagaagctattgctattttaaaattaactaataaagcttcatcaccagtaattgaaaaagtattaatgtccgctttagcaaatgctgaacataactatgacatgaatacagatgaattagttgttaaagaagcatatgcaaatgaaggaccaactttaaaacgtttccgtccacgtgcacaaggtcgtgcaagtgcaatcaacaaacgtacaagccacattacaatcgtcgtaagtgacggtaaagaagaagctaaagaagcttaataactatttaaggagggaatactgtgggtcaaaaaattaatcctatcggacttcgtgttggagttatccgtgattgggaagctaaatggtacgctgaaaaagatttcgcttctttattacacgaagatttaagaatccgtaaattcattgataacgaattaaaagaagcgtcagtttctcacgttgaaattgaacgtgctgctaaccgtattaacatcgcaatccacactggtaaacctggtatggtaattggtaaaggcggttcagaaattgaaaaacttcgtaataaattaaataacttaactgataaaaaagtacacatcaacgttgtggaaattaaaaaagttgatatagatgctcgtttagtagcagaaaatatcgcacgtcaattagaaaatcgtgcttcattccgtcgtgtacaaaaacaagctataactagagctatgaaacttggtgcaaaaggtatcaaaactcaagtatcaggtcgtttaggcggagctgacatcgctcgtgctgaacaatattcagaaggaactgttccacttcatactttacgtgctgacattgattatgcacatgctgaagcagacactacttatggtaaattaggtgttaaagtatggatttatcgtggtgaagttcttcctactaagaatactagtgaaggaggaaaataataatgttactaccaaaacgtgttaaatatcgtcgtcaacatcgtccaaaaacaactggtcgttctaaaggcggtaactttgtaacatttggtgagtatggtttacaagctacaacaacttcttggatcacatctcgtcaaatcgaatctgctcgtatcgctatgacacgttacatgaaacgtggcgggaaagtttggattaaaatcttcccacatacgccttacactaaaaaacctttagaagtacgtatgggtgctggtaaaggtgctgttgaaggctggatcgcagttgtaaaaccaggtcgtattttattcgaaatcgctggtgtatctgaagatgtagctcgtgaagcattacgtttagcaagtcacaaacttccagtgaaaactaagtttgtaaaacgtgaagaattgggtggtgaaacaaatgaaagctaaggaaattagagacttaaccacttcagaaatcgaagaacaaatcaaatcttcaaaagaagagctttttaacctacgctttcagttagctacaggtcaattagaagaaactgcacgtattcgtacagttagaaaaacaattgcacgtctaaaaactgttgctcgtgaaagagaaattgaacaaagtaaagctaatcaataaagtataagaaagaggaggttacaaaagtgagtgaaagaaacgatcgtaaagtttatgtaggtaaagttgtttctgataaaatggacaaaacaattactgtacttgttgaaacttacaaaacacacaaattatacggtaaacgagtaaaatactctaaaaaatataaaactcatgatgaaaacaattcagctaaattaggagatattgttagaattcaagaaactcgtcctttatcagcatcgaaacgtttccgtttagtagaaattgttgaagaatcagtaattatttaatacaagattagagataagggaggtttaactaatgatccaacaagaaacgcgtttaaaagtagcagacaactctggtgctcgtgaagtacttacaatcaaagtattaggtggatctggtcgcaaaacagcgaacattggcgatatcatcgtatgtactgttaaaaatgcaacaccaggtggcgttgttaaaaaaggcgacgttgtgaaagctgttgttgttagaactaaatcaggcgtacgtcgtaacgatggttcttatatcaaatttgatgaaaatgcatgtgtcattattcgtgatgacaaaggcccacgtggtactcgtatctttggtcctgttgctcgtgaattacgtgaaggtaacttcatgaaaatcgtatcattagcaccagaagtactataatttattaaaaccataatatttaaggaggtgcccacatgcatatcaaaaaaggtgacaacgttaaagttatcgcaggtaaagataaaggtaaagaaggtaaagtaatcactactgaacctaaaaaagaccgcgtcgttgtggaaggtgttaacgttattaaaaaacaccaaaaaccaaatcaattaaatcctgaaggtggaatcttagaaacagaggcagcaatccatgtttctaacgtacaattattagatcctaaaacaaatgaacctactcgtgttggttacaaatttgtagatggtaaaaaagttcgtatcgctaaaaaatctggcgaagaaatcaaatctaataattaataactagttgaaaggaggatccactttgaaccgtttaaaagaaagatacaatactgaagttactcaaaacttagttaaaaaattcaactatagttcagtaatggaagtaccaaaaatcgaaaaaatcgttgtaaatatgggtgttggtgatgcagttcaaaactctaaagtgttagataatgctgttgaagagttagaattaatcactggacaaaaaccattaatcactaaagctaaaaaatcagttgcaacattccgtttacgtgaaggtatgccaatcggtgcaaaagtaacacttcgcggagaaagaatgtatgaattcttagataaattaatcgcagtttcattacctcgtgtacgtgacttccaaggtgtttctaaaacagctttcgatggtcgtggtaactacactttaggaattaaagaacaattaattttcccagaaatcgattatgataaagtaagtaaagtaagaggaatggatattgttatcgtaacaactgctaacactgacgaggaagctcgtgaattgttaacaaacttcggtatgccatttcgtaaataatctctaaaaggaggctaattaagtggctaaaacttctatggttgctaagcaacagaaaaaacaaaaatatgcagtacgtgaatatactcgttgtgaacgctgtggtcgtccacattctgtatatcgtaaatttaaattatgccgtatttgtttccgtgaattagcttataaaggccaaattcctggcgtacgtaaagctagctggtaagatcaaagagtttgaaaggaggcaacaataaatgactatgacagatccaatcgcagatatgcttactcgtgtaagaaacgcaaacatggtgcgtcacgagaaattagaattacctgcatcaaatattaaaaaacaaattgctgaaatcttaaaaaatgaaggtttcattaaaaacgtagaatacgttgaagatgataaacaaggtgttattcgtttattcttaaaatatggtcaaaacaatgaacgtgttatcacaggattaaaacgtatctcaaaaccaggtttacgtgtatatgctaaagcgaacgaagtgcctaaagtattaaatggtttaggtatcgcattagtttcaacttctgaaggtgtcatcactgataaagaagctagaaaacgtaacgttggtggagaaatcatcgcatacgtttggtaataataaataaggaggtgccataacatgagtcgtgttggtaagaaaattattgacatccctagtgacgttacagtaacttttgacggacaaactgctactgtaaaaggtcctaaaggtgaattaactagaacttttgatgaaagaatgacttttaaacaagatgaaaacactctagaagttgtaagacctactgattctaaagaagatagaacagttcacggtacaactcgtgcgttattaaataatatggtacaaggtgtttctcaaggttttgtaaaaactcttgaacttgttggtgtaggttaccgtgctcaaatgcaaggtaatgacttaatattaaacgttggttactctcatcctgttgaaattaaagctgaagatggcattactttcgcagtagagaaaaatacaactgttacagtatctggtgtatctaaagaacaagttggagctatcgcttctaatattcgttcagtaagacctccagaaccttataaaggaaaaggtattcgttaccaaggtgaatatgttcgccgtaaagaaggtaaaactggtaaataatagataactctctaaagaaaggagtaatacaatgatcagtaaaattgataaaaacaaagtgcgtttgaaaagacatgctcgtgtgcgtactaaattatcaggtacagctgaaaaaccacgtttaaatgtatatcgttcaaacaaacacatttacgcacaaattattgatgatgctaaaggtgaaactttagtacaagcttcatctcaagataaagatatcgctagtgattctacttctaaagttgatttatcaactaaagttggtgaagtaatcgctaaaaaagcttcagataaaggtatcaaagaaatcgtatttgatcgtggtggttatttatatcatggtcgcgttaaagcgttagctgaagctgcgagagaaaacggattagaattttaatttaaaggagggacaaatacatggctcgtagagaagaagaaacgaaagaatttgaagaacgcgttgttacaattaatcgtgttgctaaagttgttaaaggtggacgtcgtttccgtttcactgcattagtagtagtaggagataaaaatggtcgtgtaggtttcggtactggtaaagctcaagaggtaccagaagctattaaaaaagctgtagaagcagctaaaaaagatttagtagtagttccacgtgtagaaggaacaactcctcacactatcactggccgttatggttctggtagcgtatttatgaaaccagctgcacctggtacaggagttatcgctggtggtccagtacgtgccgtattagaattagcaggtatcactgatatcttaagtaaatcattaggttcaaatacacctatcaacatggtacgtgcgacattaaatggtttacaaaaccttaaaaacgctgaagatgttgcgaaattacgtggcaaatcagtagaagaattatataattaaggagggaaaataaataatggctaaattacaaattaccctcactcgtagtgttattggtcgtcctgaaacacaacgtaaaactgttgaagcgttaggtcttaaaaagactaatagttcagtagttgttgaagataaccctgcaattcgtgggcaaatcaacaaagttaaacacttattaacagttgaagaaaaataattaaggaggtgcctaaataatgaaattacatgagttaaaatcagctgaaggttcacgtcgtgtacgtaaccgtgtaggtcgtggtgctggttcaggtaatggtaaaactagtgctcgcggtcaaaaaggtcaaaaagcacgttcaggtggtagcgtaagaccaggatttgaaggtggacaattacctttattccgtcgtttaccaaaacgaggtttcactaacattaatcgtaaagaatatgctattgttaatttagaccaacttaatcaatttgaagatggtactgaagtaactccagctttattagttgaaactggtgtggttaagaatgaaaaatctggtattaaagtactaggcaacggttcacttgataaaaaattgacagtgaaagctcacaaattctcagcttcagcggttgaagctatcgatgctaaaggtggagcacacgaggtgatttaatgtttcaaacgtttatgagcttctttaaaactaaagaagttcgaaacaagattttcttcacattagcaatgttagtaatattcaaaataggaacttatattccggctcctggagttaatcctgagccttttgaacagcaaggttctgatcaaggtgtcgctgctcttcttaatacgtttggtggcggagccttaaagaacttttctatctttgctatgggtataatgccgtacatcactgcttctatcgtaatgcaattattacaaatggacattgtccctaaatttactgaatgggctaaacaaggtgaagtaggtaaaagaaaacttagcaatgtaacacgttatttcgctattatattggcatttatacaatcaattggtatggcatttcaatttaataactatttaggcggtaaattgattattcatcaatctgtcatgagttatttattgattgctgtagttttaacaactggaactgcatttttaatttggcttggtgatcaaattacacaatttggtgtaggtaatggtatttcaatcattatctttgcaggtattttatcgacgttgccatcatcaattatccaatttgtgcaacaagcatttgttggtaatgacgatacaacgttagcatggttaaaagttattggtttaattgttggattaattttattaacaattggagcgatttatgtattggaagcgaaacgtaaaattccaattcaatatgctaaaaaacaatctgcacaacgtttaggatcacaagcaacatatctacctttaaaagtaaactctgcaggggttattccagtcatctttgcgatggcattcttcttattgccaagaacattaacattgttcttccctaaagctgattgggcgcaaaatattgcagaatatgctaacccttcaaacacttatggtatgattgtttatgtcatattaattattgcatttgcatatttttatgcttttgttcaagttaatcctgaaaaaatggctgataacttgaaaaaacaaggtagttatgtaccaggaattagacctggagaacaaacaaaaaaatatattactaaagtactttatcgcttaacttttgtaggctctattttcttagcagttattgctattcttccaattatagcgacaaaatttatgaatttacctcaatcaattcaaattggtggtacaagtttattaatcgttattggtgtagcaattgaaactatgaaatcacttgaagcacaagtgagtcaaaaagaatataaaggctttggtggtagataatttgtaggagggcaatttatgaatatcattttaatgggtttacctggagctggtaaaggtactcaagcgagtgaaattgttaagaaattcccaataccacatatatctactggtgacatgttcagaaaagcgattaaagatgaaactgatttaggtaaagaagctaaatcatacatggatcgtggagaattagtccctgatgaagttactgtaggtatcgttaaagaaagaatttctgaagacgatgcaaaaaaaggtttcttattagatggattccctagaacgattgagcaagctgaagcattaaacaacattatgtctgagcttgacagaaatattgatgctgttatcaatattgaagttcctgaggaagagctaatgaatcgtcttacaggtcgtcgtatctgtgagaaatgtggtacaacttatcatcttgtatttaatcctccaaaggttgatggtgtttgtgatatcgatggtggaaaactttatcaacgtaaagatgataatccagaaacagtatctaatcgtttaagcgttaatgttaaacaatctaagccaattttagagtattacgatgaaaaaggcgtattgaaaaacattgatggtgcgaaagatattgacgaagtaaccaaagatgtcattgatatcttagatcaattaaaatagatcaactaatgtgcgatctagatttatgtgaactttgattaggtttctctggcaagaatttattttttgagtgtcgtatgacgatcataattcccgcattttgttaaacttataataactattcactatattagattcgtatcgttgaagttgtctattgacgattaccttactattgtaaaaagggggaagttaatcaatggcgaaacaagatgtaatagaattagaaggtacagtacttgatactttaccaaatgctatgtttaaagtagaattagaaaatggtcatgaaattttagcacatgtaagtggtaaaattagaatgaattatattcgtattctacctggcgacaaagtaacagtagaaatgtctccgtatgatttatcacgcggcagaattacgtatcgttataaataatcgtcactccataatatagggaggtataaaaatgaaagtaagaccatcagtaaaacctatttgcgaaaaatgtaaagtcattaaacgtaaaggtaaagttatggtaatttgtgacaatcctaaacacaaacaaagacaaggttaataaaagagaggtgtaaaaatatatggcacgtattgcaggagtagatattccacgtgaaaaacgcgtagttatttcattaacttacgtatatggtatcggtacttcaacagctaaaaaaattgttgaagaagctaacgtatcagctgatacacgtgtaaaagatttaacagatgacgaattaggtcgtatccgtgaagtagttgacggttataaagtagaaggtgacttacgccgtgaacaaaacttaaacattaaacgtttaatggaaatttcatcataccgtggtattcgccaccgtcgtggtttaccagttcgtggtcaaaaaactaaaaacaatgctcgtactcgtaaaggcccagttaaaactgtagctaataagaaaaaataataggtaaaggaggcaaaatataaatggcacgtaaacaagtatctcgtaaacgtagagttaaaaagaatattgaaaatggtgtagcacacatccgttcaacattcaacaatacaatcgtaactatcactgatgaatttggtaatgctttatcttggtcatcagctggtgcattaggtttcaaaggatcaaaaaaatcaacaccattcgctgctcaaatggcatctgaaactgcttcaaaatcagcaatggaacatggtttgaaaactgttgaagtaacagtaaaaggacctggaccaggtcgtgaatcagcgattcgtgcattacaatcagctggtttagaagtaacagcaatcagagacgttactccagtacctcacaacggttgtcgtccaccaaaacgtcgtcgcgtataatttttattgatggttatgattacaaatcactgagcgaaacaattttaaaattaattcgacgttattaaggaggattttgtaaatgatagaaattgaaaaacctagaattgagacaattgaaattagtgaagatgctaaattcggtaagttcgttgttgaaccacttgaacgtggctacggtactacactaggaaactccttacgtcgtatcctactatcttcattaccaggtgcagcggttaagtacatcgaaattgaaggtgttttacacgaattttcagctatagacaatgttgttgaagatgtttctacaattattatgaacatcaaaaaattagcattgaaaatctattctgaagaagataaaacattagaaattgatgtgagagatgaaggcgaagtaacagcaagtgatattactcacgatagtgatgttgaagttctaaatccagaacttaaaattgcgacagtgtctaaaggtggacatttaaaaattcgtcttgttgctaataagggtagaggttacgcattagcagaacaaaataatactagtgatttaccaattggtgtaattcctgtagattcactatattcacctgttgaacgtgtaaactatacagttgaaaatacacgtgtaggtcaaagtagtgattttgataaattaactttagatgtttggactaatggttcaattactccacaagagtctgtttcattagctgctaaaattatgactgaacatttaaatattttcgttggtcttacagatgaagcgcaaaatgctgaaatcatgattgaaaaagaagaagatcaaaaagaaaaagtacttgaaatgtctatcgaagaattagacttatcagtacgttcatacaactgtttaaaacgtgcaggtatcaattctgttcaagaattagctgacaagtctgaagctgatatgatgaaagtgcgtaatttaggtcgtaaatctcttgaagaagttaaatataaattagaagatttaggattaggtttaagaaaagaagattaataggttaaaggaggttaactcatgggttacagaaaattaggtcgtacttctgatcaacgtaaagctatgttacgtgacttagctacatcacttatcgtaagtgagcgtattgaaactacagaagctcgtgcaaaagaagttcgtagtgttgttgagaaattaatcactttaggtaaaaaaggtgacttagcatctcgtcgtaatgctgctaaaacattacgtaatgttgaaatcttaaatgaagatgaaactacacaaactgcacttcaaaaattatttggtgaaattgctgaacgttatgcagaacgtcaaggtggatacactcgtattcttaaagtaggtcctcgtcgtggtgacggtgctgaatcagttatcatcgaattagtagattaattttatatataaatacactaactacttgtatttaaagcaaatgagtgcaacgataatgtttgccacatacaaatattgtctagctcagagtaccccatcaactaaatactaatataaagcgtgaactcaactaaaatgtgatggggtgcgcgcttttttaattttaatgaatctatactgattaaaaagagtcgtgcttttgaggcatgactctttttatatatgaaagacatttactcatgtacatctagtttttattcatgtaaactattgtagtaactattaataaaggaggaaggctgtgaaaactgataataacaatatcatcgaacttaaacatgtacattttcaatatcaaaacgatgcggccttcactttagaagatgtgtcatttaatataccaaaacatcaatggacatccattgtaggacataatggttcagggaaatctacaattgcaaaacttatagtaggtatagaacaagcaactgaaggagaaattttttataacaatcatttagttactcctgattatttaagagaggttagacgccatattggtattgtctttcaaaatccagaaaatcaatttgtaggttcaattgtggaatatgatgtagcttttggactcgagaatcacgcagtatctcatgacaaaatgaaagcaatcgtcattcaatctttagataatgtagatatgaaagaatatatggaatatgaaccacattctttatcgggaggccaaaagcaacgcgtggctattgcaggagtcttagcactaagtccagatgtcatcattcttgatgaagcaacctctatgttagatccccaaggtaaacagtctttactttcattaattaaacaagttaaacaagaaaaaaatttaacgattatttctattactcatgatttaagtgaagcgttagaaagcgatcatgtcgtcattatgaataaaggcaaagtttacaaagaaggtaagccaaattttatttttttaaatacacagtatttagtagagattggcttagatttaccatttgcaatgaaaatgaatcaaaagctaggctttaaagatgaattcactacatatgaagggctggttgataaattatgaccattcaatttaatcatgtttcatatatttatcaaaaaggcactccttatgaatatcaagccttaaatgatatcaatctcaaaattgagcaaggtaaatactatgcgattgttggtcaaacaggaagtggtaaatccacactcatccaacattttaatgggctattaaaaccaacaaaaggtagtattacttttgataataaggagattactcataaaacaaaagacaagcatctacgagaattaagacaacaagtaggtttggtttttcaatttcctgaatcacaattgtttgaagatagtgtggaaagagaagtagcatttggtcctaaaaattttaagatgaatgtggaacaagttaagtcttatgcgtatcagttactcttagatttaggttttgatcatcatattatggaacaatcgccatttgaaatgtcaggtggtcagatgcgtaaaattgcattagtttctatccttgcaatgaaaccgaatataattattcttgatgagcctactgctggacttgacccaaaaagtcgtcagcaagtgatggaattaataaaatcaattcaagtcaatcatcataaaacagtcatattagtgtcacacgatatgaatgatgtggcgcgatatgctgaagaaatcattgtaatgagacaagggaaagtaatagaacagtgctctcctaaatcattattcagacaacacaaaaaactgaaagattggcatattgcattgcctgatgtagtacaactgcaatatgattttgaagataaatatcaaaccatgtttaatgatattgccttaaatgaagatgagtttgtaacattgtatcaggagtggcaagaacatgaaaaataaacttattataggacgttatttacctaataactctgtgatacatcgtcttgatcctagagcaaagttaatttttgtatttgtatttattatttttatcttttttgctcattcttttgctacattcgcttgggtaatattattaattctatgttttatgaaaatggctaaaattcaattttggtttttaattaaaggattaacaccgatatttttcttcttaatctttacgtttgtaatgcacatattctttactcacggcgggactacgctattagaaataggttttattaaaattgatagtacaggggtattagaaggtgtttttatttctttaagattaataacgattgttatggttgcgacaattatgacattatcaacaagtccaattgacttgactgatgcttttgaaaagttaatggccccattgaaactatttaaaattcctgtgcatcaattaagtatgattatgtcaattgctttaaggtttattccaacattgatggatgaattagataaaattatccttgctcaaaaatcaagaggttctgaaatcagttcggggagtttaatgacaagaattaaagctttcatcccattaatgataccgctatttatttctgcctttcaaagagctgatgaattagccattgcaatggaagttagaggatatgatgctaatgtacaacgtacaagttatcgtaagttgtcatggcataagagagatactttgagtctattcagtctgatacctattggaatgatattatttatattaaaatatatgggagtgtaagacattgcgcatactagtaaatattgcgtatcaaggacatggatttcttggttttcaaattcaacaacaaggtagaactgttcaacaacaatttgaaaaaattttaaaacgtatgcatcgccgacatgtgcgtatacatccatcaagtcgcacagatcgtggtgtgcatgcttatgaacagtattttcattttgacacagaattgaatattgagcctaaacaatggaaatatgcgatgaatagtgcgttacctgaggatatttacgtgaatagtgtaaaacaagtagatgacacgtttcattgtcgttatgattgtgtaggtaagagatatcgctataaagtgtatcaagcggaacatcgcaatccatttgaaagtggtcttaagacatttataaaagatgacttagatttagataagatgaatgaagcggctaaacactttattggaactcatgattttactggattttgttcacaaaagactgaagttgaaagtaaagaacgtacactataccaaagtgaagttgtaaaaacggacgaaggttttgactatatcgtcacaggttctggtttcttatataatatggtgcgtgtacttgtagcttttttagtagaagtaggtaaagggaagcgacaacctaacgaagttcctgagctgcttaaagctaaaaatagagataatgtgccttttacagcacccgctgaaggattatatcttgaaaagatatatttagatccagaagcacttaaaaatgactttggtgaggatgtaaaaatacattataaaaaatcattacaaaatgactaatatgcattgacaaatgggtttataaaatataagatagttaacggtattgttttatatcatcccacgataagccccggaaacttattgtgttacaagatatataagcagattagacaggaataaaataaatgaacattacgctttgaaatcgtaacagaatgacctagattgcaggcctcgttcgtaggttcgactgcgatgagtacctgtaatctaagacgaagcatttatttttaggaggataattattatgcgtcaaacatttatggcaaatgaatcaaacattgagcgcaaatggtatgttatcgatgctgaaggccaaacattaggtcgtttatcatcagaagtagcatctatcttacgcggtaaaaataaagtaacttatacaccacacgttgatactggtgactatgtaatcatcatcaacgctgaaaaaatcgaattaactggtaaaaaagaacaagataaagtttactaccgtcattcaaatcacccaggtggtattaaatcagtgactgctggtgaattaaaacgtaataaccctgctcgtttacttgaaacttctatcaaaggaatgttaccaagttcacgtttaggtgaaaaacaaggtaaaaaattatttgtatatagtggcgctgaacacccacacactgcacaacaaccagaaaactacgaattacgtggttaattagaaggaggaaattacattggcacaagttgaatatagaggcacaggccgtcgtaaaaactcagtagcacgtgtacgtttagtaccaggtgaaggtaatatcactgttaacgatcgtgacgtacgcgaatacttaccattcgaatcattaatcttagacttaaaccaaccattcgatgttacagaaactaaaggtaactatgatgtattagttaacgtatacggtggtggtttcactggacaagctcaagctatccgtcatggtatcgctcgtgcattattagaagctgatccagaatacagaggttctttaaaacgcgcaggtttattaactcgtgacccacgtatgaaagaacgtaaaaaaccaggtcttaaaaaagcacgtcgttctccacaattctcaaaacgttaatattggaattgttgcaaacttgtttgcttacaagttcagtatgcaaattgcgtcagcaatttgtgttccattagaacgattaaagcacttctcaactttgagaagtgcttttttatacataggaaaaactaatggagcaatagtcatatttaatacagttatcgactacttaacatgttaaaaacgtctaagacagatgtcttaggctgatatatctttttattttttcatcacttcttcaacaacttcggtcatatcactgtgaataactaaattagctttcctatcatatggtgtagcgtctctattaataattacaagattgtctcctgtaaagttagaaataaagccagcagcaggttgtacgaccaaggatgaacctaacacaatgacagtatctgctttttggattttatctaatgctctaaagacagtaggctgatcgagcatttcaccgtataatacgatatcagggcgaatgacatcaccgcagttctcacaatatcttaatttgtgttccataacatatgatttcgtatattcttttccacaattgatgcaataaaagcgattcagtgtaccatgaatttcatcaatatgttcacttccagcatcttcatgtaacccatcgatattttgggtaatcacacctaaagatttgccttctttttctaactctgcaatccattcatggacgatattaggttttttatctgctactagtagtcgtttatgataaaagtcgataaagctttctttattatcatttaaatgatcaatacttaataaatattcaggtgaataaccctcttttgaaatttcatcaaataatccacccatggaacgaaaatcaggtataccacttgcaaccgatacacctgcaccagtaaaaaatacaattttgtttgatttatcaacaatttcttttaatttttcaattttattactcaatctgagcacctcgtttataataatgactaatataacttttttaaaatgaattttatactattattacaacatatttttacctttattttctagttttaaaacaagtaatagtatagaatgaaattgcgcttaaaatctttatgagatatatgtgttcattttatatggacatgtttaataaaataagttggatgtgagaatttgaatgaataaatacgatcgtttagaagaaattactaaactcgtaaatcaaaaaggaacagttaggacaaatgaaatcgttgaggatcttaatgtatctgacatgacagtacgtcgtgatttagctgaactagaagaaaaaggattactaactaaaatacatggtggtgcacgtagtaattcagcttttcaaattaaagaaaagtctcatcaagaaaagcacacagagaatattgaagaaaaacgtgctgtcgcaaggaaagctgttaacttaattgaagaaaacgatacgatttttttaggacctggaacaacaatcgagttactagctcaattaatagaacgagagtcattaactgtgattacgaattgttttccagtatttcaaatattatttgaaaagcgttcgctaaattttaaagtttacttattaggtggagaaatgagagaacttactgaatcatttgtaggtgaaatgacaaatacgctccttaaaacaaaacgatttagtaaaatgttttttagttgtaatggagtaaaagatgcagatgtactcacttctacaattgacgaagcgtatacacaacaacttgcacttcatcgttcacttgaaaaatacttattaattgatacttcaaaaattggaaaagaagattttactcaattatgtcatttagaagatttaacggcagtagttgtagataaaaatgatgaagataatgtacaaaaattaaaagcttacacagaagtgatacattaattgaatgataccaagattgtttatttaaacaatcttggtatttttttagataattgaatgcaattaaacataaaaataaaatattttgtttaaaaaatgaaacttcaaacaatattcgaacatttattgttgattatttgtttatttatgtttataatttaggtgtaaagatttgaaagcgctttttcaaacacatgtgtttaattatcttattttcaaaggagaatcattatgacaatttttattggttcagatgtcgctggtcaacgtcttaaagatgttataaaaacatttttaaaagaaaataaccatgatgtagtagatgtaacagaaggaaaagaattagactttgtagattcaacattagcagttgtacacgaagtacaaaagaacgatgataatttaggaattgcagtggatgcttatggtgcaggtagttttattgttgctacaaaagtaaaaggaatgattgctgctgaagtatcagatgaacgttcagcatatatgacacgtagtcacaacaatgcacgcatgattacaatgggtgctgaaattgtaggcgatacattagctaaaaatattgctaaagaatttgtaaatggacactatgatggcggacgtcaccaaatccgcgtagatatgttaaataaaatgtgctaattggaggaataaataatgaaaattgctataggttgcgatcacattgtaactgatacaaaaatggaagtttcacaacacttaaaagctcaaggacacgaagttattgatgtaggtacgtatgattttacacgtacacattatcctatcttcggtaaaaaagtaggagaaaaagttgctagtggagaagcagatttaggcgtatgtatttgtggtactggcgttggtattagtaatgcagcaaacaaagtcccaggtgtaagaacagcattagtacgtgatatgacatcagcactttattcaaaagaagaattaaatgctaatgttgttagtttcggcggtaaagtagcaggcgaattatttattttcgatatcgttgatgcatttattaaagcggaatacaaacctactgaagaaaataaaaaattaattgctaaaattaatcatttagaagcacataacgataatcaagctaatcctcacttctttgatgaattcttagaaaaatgggacaagggtgaatatcacgattaaggaagatgtgaaatgattctaacattaactttaaatccttcagttgatatctcttacccattagaacagtttcatctagatactgtgaatagagttaaaaagacgagtaaaactgctggaggaaaaggattaaatgtaacacgtgtattatcagaatttggcgaaaatgtgttagcaagtggctttttaggtggcgcattaggtcaatttattgaagaacaattaatggatgctcaaattgaacagtctttcttcaaaataaaaggagaaacgcgaaattgtatcgctattctacatgaaggacaacaaactgaaatactcgaacaaggaccaactattgacaaggaagaagcagaaagctataaagcacatcttttagaactatttaaaagagctaatgttatagcgatgtctggaagtttacctaaaggtcttaacacaaattactacgctgatattgtgaaattagcaaatgaacaaggtctacctacgattttagatagttctggtcaatcattaatggatgtattgttgagcgaaaataagccttcagtgacaaaacctaatattgatgaattatctcaattattacacactactgtcactacagatatcgatagtttaaaagaagcggttactcaacccatcttcaaaggtattgaatggattattgtttctttaggtggcgatggcgctttcgctaaacatcatcaaacattttataaagtaaatattccaaaaatagaagtcgttaatcctgtagggtctggtgactctacagtggcaggtattgcctcaggtcttgttcatcaacaatccgatgaagatttactgaaaaaagctaatgcatttggaatgttaaatgcaatggagcatcaaacaggtcatatcaatgtagataaatttaaagaactattcaaacaaattgaagttatagaggtgtaattcatgacaaaatcacaacaaaaactagcatcaatcgaacaattaagtaatcaagatgggattatttcagctttagcatttgaccaacgtggggcattaaaaagaatgatggctgaacatcaaacagaacctcctacagttgaacaaatcgaacaattaaaagtacttgtatcagaagagttaacacaatatgcatcttctattcttttagatcctgaatatggcttacctgcttctgatgcacgtaataaagagtgtggtttattacttgcatatgaaaaaactggatatgacgtgaatgcaaaaggtcgtttaccagattgcttagtagaatggtctgctaaacgtttaaaagaacagggtgccaatgcagttaaattcttactttattatgatgtagatgattcagaagaaattaacattcaaaagaaagcttatattgaacgaattggttcagaatgtgttgctgaagacattccatttttcttagaagtgttaacttatgatgataatattccagataataaaagtgctgaatttgcaaaagtaaaacctcgtaaagtaaatgaagcaatgaagttattctctgaaaatcgattcaatgttgatgtgcttaaagttgaagtacccgtaaatatgaattttgtcgaaggatttacagagggtgaagttgtatacacaaaagaagaagcagcacaacatttccgtgatcaagaagcagcgacacatttaccttatatttatttaagtgctggtgtatcagctgaattattccaagacacattaacatttgcacatgatgcaggtgcacatttcaatggtgtgttatgtgggcgtgcgacatggtctggtgcagttaaagtttatattgaacaaggagaacaagctgcaagagaatggttacgtacaactggatataaaaacattgatgatttaaataaagtactaaaaacaactgcaacatcttggaaagcaaaataacttaggggaggttattcatatgaatagagaagaagtacaattacttggttttgaaattgtcgcatatgcaggagatgcacgttcaaaattattagaggcattaaacgctgctaatgaaggtgattttgataaagctgaacaacttactgaggaagcaaatgaatgtattgcaaatgcacataaagctcaaacgaacttattagctcaagaagcgcaaggtgatgacattgcatttagtattacaatgattcacggacaagaccatttaatgacaacgttattattaaaagatttaatgaagcatttaattgaattatacaaaaaagggagctgacccctatgaataagttaatagcatggatagaaaaaggaaagccgttctttgaaaaaatatctcgtaatatttatttaagagcgattcgtgatggatttattgcagcaattccaattatcttgttctcaagtatatttattttaatcacatatgtacctaacgtgtttggctttacttggagtaaaacgatggaaggtatattgatgaaaccatataactataccatgggtattgttggtttaagctaaaaaagagctagaaacattgatatgacggcgttcctaactcttgatgatatgaattgaatacgttttgaatacgtgattactaaaaactaacataatttgcgaacttttcggccactttctcacgctgcttttctgtaacgtgtgcatatattcccattgtcgtttgtatatccccgtgacctaatctatcttgtacctcttgaacagataagcccgcttcaaataataatgaacagtgtgtatgtctaaagccatgtactgttatccttttaaaattattcttcttacatatcaaattcaaagtttcattagcatatactctatttagtcgtttattcgtttctacattcgtgaatatttcttgatgtttgctagatgtattatgaccgtgtttaagagataacacacgttgttgagtacgccactcttttaatacttctaaggttttactatcaacgctgatcgttctaatagatgaacgagttttaggagtatctataaactgtctatgatttaagccctctgcaagcgtcttattcacgcttaacgtctgattagtaaaatctatatcattccatgttaaagccattaattcgccacgtctgataccagtaaaggcaagtgtacgaaatagagcatgatgtaatacattatcttttacaagctctaaaaactgctgtaattcatcacttgtatagtatttcattgtttcgtgcttttgattacttttcttacgtggtgcttttatgtgattaaatggattatcagttatgatttttaaactgatagcatactcaaagatagtagacgcatatatacgcccctttttcgtttctgaatatgttcgataccactcattcactactttttggcaatgtggcacagtaatatctttaatagccatatccttaaagtgtgggagtatcatcattttaaacgttgtcattgcttgctgataggtgctttcttttactgtatttctatattgttctaaccatagttcatatatttgcttaaatgtcattatttcagtgtttaagaagccgttagcttgtacttctgtttgtagcttagcttctgcaattttggcctctctctcagttttaaagccacgtcttgttgtccgcttctgcttacgagtaatcggatcaacaccgagatatgcaacaaacatatacgccgttgagccgtctttctttttatatttcttaatcattgtaaatcaatcctttctacttgcccgcatgcgtttgattggattgaacacacctttgagaatggttactcattggtgcggtaatagtaataatattgttgtaagtgaatttataggagggtaggcgagctacccaataattattcttgaaataataagcaatgtaacttataatgtgattaagataactcgagaaggattaacgctgggtcccaaaaaggggtaggtgcatacgcactgagcattcctatgtgcctggggttatctttttttattttttaaactatcaactaaactatcaacaaatttagttgggttcttttttatttcattaacgatgaattcaataaattgttgggaataggtaaaagattgttgttttcctattgtatgcttaaatgcatatttttcttcattttttatattataaaaatcaattattaaatttaatacatattgattgaaacctttagaatatgacatatttatatttttctttttcaatctttcattgactgcagttatgacatttttaaatgaatatttatgtgtatctgacggatctttatattcttttactacatcgactttgttatcagaacctttatgaatagctactgtaaaatcagcattttctgtctttttagtaatataaaggttttgtctaatcccaattgaaaatttatctgaattatattccttgctcaacacatctatctcattagtttcttttattaatttttcagcaatttcaggtgggtatttcaattttatttgttcgttagataatggctcgtagctagcagagatagttaaaaagttttgcgaaatattttcggaaacatcttttttgtgaaatctcatagtttcattaatgtaattcattacacacgcttggaatagtggagcatacttaacttcatattcttgagttataaaatgagtacttatatttcttaaatctacaattttttccagatttaatctaattcgagtattataatcaggatagattgatttaatggcattatttaaactaattgttctttctggattatcttcataataaatactttctccgcgattcaatagttctgcttttaacattaattcccatgcattacatataaagaaggaaaagccctcaattctatatttaattgttggtttattatatatttccaaacctaaaataaaagattcaatgcttttatcaactaattgtttacttaagttttccatctctcaacctcctttaattaattactcatcatcttctaataaatttgttacattaaccgttatttcttttgtagtagggttaatgcttacatcctctccatatcctaatgattttacttgaatagtatcgtttactaattttaatgctatttcaacatgttgataatcttgcaaaattaacaaagtatcttcatttgtcacaacatcatgtgatccttttccgttaatagtaactttccagtcattgaagtacattctatctttctcctttaattaaatttaaatataaacgactatgtaatgctatattagtgtgtaaatagtatgtatgaactcgtaagcagaagtgagagagttaatcagtgatttgtgagtatctttctattaaagtgtctatatctttaagtatattaatattaatataatcacttaattcagaagattctaatacagtatttttaaatgtatagtcagtaggataactgttttttactattcctaaaaagttttcaaaatctgctttttcatcttcagttaatctattttcattagacaatatagcattaaactttaataattcatttataacatgagcaataaaatgtatattatttgatttattatcctcaattgtaatccttttttcgatttcaaaatctctaaatatataataattgtttattatgtcacttactgttatattttcattgtttaaatactttttgtatatttcattaccttgtgaaattatctgtagtgttttgaaattgtaatttttgaagctgctaattattcttttagctttttccattaactcgcttataattaaatctaaattattagtagcaaattctaataactcattataatcatatacgtgttctctctcagtagaaaattcacttaaattaaatgttatatacagattgtatttagtgaatatttgttgatataaatacgtttctcccttactattcaatcctgataaatcatatttgtcactttttaaagaaaaacgtttttgcaagaaattaataggatcgccatataataaataatctacaccaatatttccaagctcagctatttgtttgagtctttttttgttaggtaaatttgcaccattttcccattttgaaacgttacttttacttacgttaaataattttccaaaatcacttaaatctttcccgttagctatacgaatttttttaatccgttgtcctacctttagtttatcgatttcactcatattattacctccaaaaaaattatactatatcaaaataaatatttaaacctatagttgagaaaaattgagtattagttattgcaatttaattctaagtttgataaattagatttataaagttgagaggagttgagtttatgattaataaaatagctggctatagaaagatgataggaaaatcacaaaaggaaatggcaaaaaaatttgatatttctgtgcaagcttattcaaaaaaagaaaatggtttaataccttttaaagatagcgaaaaagttatatttaagaatttactattaccatatttcccagatataacaattgatgatattttttttagtcaaatgttgagtaatgttgagtttaaggaggtttctaaatgagtgaacaatctattctaagtgagtccgcttctttagaattagcaaacggtatcttaaaacttgccgaacagatagcgcagagaaagatagagcaacaacaaaagagatgggctacacaaacagaattaagaaagttatacagatgtacccatagtgatattaccgagtgggaacgtttaggacttactaaacgaaagcaaggtcgcagttattattatgatctcaaagaagtcgaagaatttttactatcacaaaaaaaataaattatctaagtcccgcatgttaataatttgtgattgaacgatagtattaattcaactttaaggtggtgtttaaattgattagatttctgaatgaactcgcttatatatgtgtaattaccatatttctaaatatgtattctgaattgcattatgcgttagtatttttcttatttgggagtatgattgcaacacttaaatttgatatgagagatgaagaacattcatatctctataaaacatacagacagcatttaagaaagaactaaagaaaaaagcattagaaaaagctaataaaaataatccaaatcacaataacaatggttttggttcagctgaaccaaaacgattaaaccagtaaagtgttcgctttagttcaactgaaccaaagcgtgaagatcatgaaacttatgaattagaaaaattatttttattaattagattaaaaattgaaataatggaggagctaaataatgaattgggaaacaagaaatttaattgatgaatttgaattagtgaaagaaaaatatcaagacttattgcaagcacaaggctggtttatagaagattaccttattcatgaaagaagtcatcaattaactaaagacgaggtaattatgcatggaatgaaataccatgagcatagaattaatattaaacaatttgatgaattactaagggtttacactaatgaattaagcaacattattgaacagttcaaaaaaatagataaaaaagaaacgtcatctgatatgaatagtttggcgactaaatcagataacgcgaataactaaaaaactaataaactactgaaaggatagcattttatgactaataaaatcaagtgttctaaaggttatggcgtaattatgcaaagtgttatgtctagcaaagatataagtatagaagctaaagcattgtattgctattacatggcacatgtgggcgacaatattatcccaagtgctacacagacatgcaatgatttgatgatcagttacaagcgttttaaaacactacgaacacaattatttgaaagaggctttttgtagattgataaaaattagcagcaaaggagggcagaatattggcaacatatagagtgaaaaaagaaagtggtaattttgtaaccattcataaaggctttataactgacgatagattatcagctaaagcaaaaggtattttattgtatttattaagtcgtcctgatgattggcaaatatatacattagaagtagtaaagcatatgaatgacgggcagaagtcaatcaatagtggtattaacgaacttattaaagttggttatgtagaacgtagtcgaaaacgtaaagataatggtgattttaatggttacgattatgcagtgtatgaaaaaccaaaaaacattcgcgaaatgccatttggggaaaacgcgaaacgcgaaaatgccaaacgcataaatgcgaaacgcgaaaacgcgaaagggcacactactaatattaataatacctataaggatttaactaataattatgatactgaaattaatagtagtagtagtgcaagcactactaaacaacaaccaccgtcacattcttatagtaatgtattcaacttttaccaagaaaatggatttggaatacttcaaccatttgtagtggatcagattgaaaactggatagatgatttcaacggtaatgaacatatcgttatagaagcattaaaagaagcagcaacaaataacgtgtgtaagtggagctatgctaacagtattcttaaaagttggtatcaagacggtattaagtctattgatgatatagaagcacgtagaaaacagcgtgaagcaagtaaaaataaaactgaatctacaaaaacattcgataactctcaatacgctgatttattttaggagggaagatacttgaaaagtattaatgatattgatttaaaaagcaaaatgcgtagtgaactgattgaagaacaatataaccttaaatgtgataaatgcaaaaacatatatagttatcataaattcagaaagtcagacggtacaattcaaataatcagaaacgggtgcgaatgtgaatccattgagaaaggaaaacaaagcagaagccagcacaaagcaaatcaaaaacgcttgaatattgaaaaagtatttaagcaatccatgatgaatgatgatttattaaaagctgaatttgataattataaaccaactaataaaaacttattagaagctaagcaaattctacaaaagtatgcagctaactttaaaccagataaaccaaagtcgctacttttacaggggagttatggcataggcaaaagtcatttagctatgtcggttgtaagagaagtcaaaaagaaaggctatacagctttattcttagatgttactgaattagtaaaagcctatcgaaatacctacaacaagaatgtagcaatgactgaaaaagaattagatcaaatgattagagatgtagatttgcttgtaatagatgattacggaacaacagtaaacgattatggaaatgaaaaactattttcactaacagacatgagaacaggtaaaagcaacatcataacaactaatcgtgaagcattagaactttctaacaatgacgataaagcaaaaagatttagtcgtttgatgaaaaacacacaaattataaaaatgcatggtacagattatagattaaaagattttaaagcataagtggtaacgggttgaatacccgttccgcttctcagaaaggagtaacacatagtatggcaagtctaaaacaagcgtatcaacaagacacagacgccgaagaaatcgaaatgattagtgatgatacgttattcacagtttacaatcctaaatttattgaagataaaaagcagatgatagaggagtatatcgaaacattatacgaacgcaatacaccaaacatggcatgtgatccagtaactcaaatggtttactatcaatcgcaaaatttagaaagcctagttatgtacatcattgaagaaaaagagaagttgagtgcgtttatcagaaaaagtaatagaaacctatatcatttatacgctgttttagaggactatacaaagcaagaacagatatttataaagaattacatcagaaatacaaaggtgcgtgataatgagcttgtgagacgctttaaaattgatttatataactatgttcaagctgaaagagagaaaagacaagaagaacttaacaaaaagtcatttaatgcgtacttagtggataaagacgaagtaaggaaaagacaacaaaagaaaaagattaataatggttatggcttaacactcaatcaagagaaagagctgcgattaattaaagaacacgaagaagaacgaaatacagatatgggggtattcattaacttaattcaacagatgaacaatgatgaactcttatcttatgtgttagaacgtcatgagtttaatattgatagttataatctcaaaatattaactgacgcagcactctaccgcttgccattgaaacagagaaaacaagcctataaccatttaaaagcaataacaagaacactagcaaataatccaatcgaaaagaggttaaaacgatatgaacaatgatgaaatgaataaattaagtgaagcattagaactatcagaatcacaaagattagcattatataactatagtgaacgagaatctaaagaaaaagcacaatcacaagaacaaaagaaagaattaagcagcttagaaaagcatgagaaacgccaacaaatcatgtctattaaagacgctaaccaacgccaagaagaaatagcgaagcatgttgaattatttaaataggagggctattcttgaaaacattaaaacaaattgaagtgcataaaaagaatattgaaagctatcaaaaggatatacaagcactagaacaagaagttaatagtgaaaaagaaaagattgatcaacttaatgcagactatcaagaattagtagtaagtggccaagttgaaaaagctgataaattatatactaagattgataagcaagaaacgacacataaagcaaaagtaaaacgtttaagtgttatgaagcaatcactgaaacaagtcattattaaaaattgtagcagcatgcaagaagaagccgataaattaagtgatgaatatattgatatttactatgatgatttacaacactataacaagctcaaagaagaactagaacaagcagaacagaaactagaagaacataacaatagttatctacttaatcaacgtaatttaagccattatatagatagattaacgagagaaaacaatattcaaccaactgagtttatgggtagcgtcaatagtcgcaaaccattttatatttaatcaatgtagcctacttttatagtgggcttattttatagtttagcgaggtattacatgaaaaaattaacaactaaacaaagacgttttgcagatgagtatatagaaacgggtaatccttattattcagccgtaaaagtgggatatagcgaagtatacgcaagagataatgctttaaaattattggaaaatattagtgtgaaatcctatatacatgagcgtttagaagaaataaagaatgataatatgaccgagaaatacggagttatgcgttatttaacaagattaataaaataggcgataatttgttaggagggataaaatgaagtcattaacgttaaaacaaaagcaattcgcagatgaatatataagaacaggcaatgcttatcagtcagctattaatgtaggttatagcgaaaagtatgcaaaagctagaagccataagatgttggaaaatgtcggaataaatcaatatatagatgataacttagaaattattcaaaaagaaagtatagctgaagctgatgagatcatgcgttacctaacacgagtacttagagccgaagaaaaagaagagatattagtatacgtgggcgacggtatgcaagaaatccaaacaatacgacctagtgccaaagacagaataaaagcagcagaattattagggaaacgttatcgtatgtggacggataagcaagaggtagaaattactacacctatttttatagatgatgtgccagaagaagattaaagaatgattatgaaaatagtacttactcaattttgagtaggtgcttttttattaagtttttgactaaccaaaactattgctcaaaaagaatataagcatatttttattaataaataattaagatattagtattttacagtaccccttattctgtatttagtattaaataagagtttaatttgttagtatctaaagtaaagatttgtttttctattttttaattttagcttttatttgcgttctaagagccattaaataaaaatatatatgaaattctctaaatgctctaaaaagcaccttaaaattgcaaataagggtatttaaaatttaaatagtccttgtgataaagttcttctaaaaaggagtgataattttgaaatggattttgtttagtatacaaatgattttggcaataattttggtgttctttgcttataaacaaatgaatcaaaaccatttagattcttggtttggcatttatgtggtacttttcatgatttttgtatattggaatgctaaacgttatcacaattattaaaggatgcatttatgccgagaaaatttattgatcgttgagaagaactattttggaataaagcaatttcattttttgagaagaaaacaaaaggagtttttgcatgaaattaggaaattacaaaattgattcgttttatataattatgattataggttttttagttacttctatatttttcccttttatgcttttatctgttcttattttattgattattggtttagaaaaagatgataaaaagggttaaatttgatttcttggtttttgaaacgtgttgaaaacgagtttctttttgttttgatttttgatgtagtattaatttttatatctgtgctacaacaccgattacttaaaactaatgtaaaaaagctgactaaaattgaagaagttgcaaataaaggtattttataattttaaaactcttatgataaagtttgctaaaaggagtgacataagtggataagattaattactttttaaaagcattagtattagcaatcatgcttcgttgtacaatgaattatgtgctcccaacacctgaaaagttatcttttaaacttttggatggacttatctttggtgtgttagtgtgccttttaattaattggtttattggtatttttaagaaatcttcacaaaaatagaccatgcatgtatttcgagaaaatttattgaggttaactaaacttggagacgaatgtcgatatagcgtgagctattaaaccgaccattcgacaagttttgggattgttaagggttccgaggctcaacgtcaataaagcaataaggtttattaatctaaaaataaaaggagtttttaattttgaaaaaagctttatttcttttactagatgaatttgcagattgggaaggagcatatttatcttcaattttaaatcaagatgataattggtctgtaagtactatttctgttgaagaaaatgtatcttctttaggtggtttttctgttttggtagattatattattggggaggaacctaaagattatgatctgttagttatgattggaggtaattcttgggataatgattctgagaaccttttaaaatttgttgaggaagcatttaataaaaatatagtaattggtgctatatgtggagcagttgattatttagctagaaatggttttttaaacaaatataaacatactggtaattcggtttatatttggcaaaattataaaaaatataaacctgagaatgaatttttagaaaagcaaagtgttgttgataatatgcttataacagcaaatggtacagcatcacttgaatttactgaatcaattttaagagagattgattttgattctgataaaaatattgaaaagacaatatttatgaataggtttggtttttataagtattgtgaaaaatacggaaatccatatttataaagttgggagtatttgggtttttagaaacaagttgaaaacgagtttcttcttgtcttgatactatatagaaatattgcaaagatgaaaaataatgtaagtatgacgtgaaaaatttttatttataaaaagtaagcgttttctatttacatgtagagccttttataagataataaatgtagctactgaaattactactcaaaatcgagtatcctttaaaatgactgtatcctttgggtacagtctttttgtttataacttgtcaaaactttacatttcataaagttacaaacggacttaaaagtccacttgtaaccagtaccttaaaatagggaagtggtttaaccagtccaaatgtgttcatatgtggacttattaccattttttaatatcctcaaatttgaggatattaatttattgctcaatctaaatgtactgagtaaatatactttctcagctcaaaagtgagctcagtaatataagtggatttactgaaaccaaatttgggctaagtgaatatattgaaagttatattccgcttctaaatgctgatacgccaagttaccgtatcagaaattcaaatatagacttattaatcaatttaatagctgacgcactaagttagtgcattagaaaaccgaaatgtcggttctctaattctgaaaagtcgtttatagcttttctgcgtagtcgaaatggcaacgcagctatttactatctaaacgacgacctatgtatcctaaaatagcaccaacaacaaacaaagatacaacgtaagctaagttaattaattgattatctgtattaagcataggttgaatataaaaagtagcaatgagaacgattatagcgaatattacgactgcaattaatctatacttcattttatacacctcaacgtttaatagtatctataactttataatacattatctaatatgatctcatggcgcaaatgtgaggagtgagaatgtaaataatttatagatactgtaaaaattgtagacaattaataaatttaatgcgtataatgatattagaagttgttcccttatgaagcacttctatatttttctatatgtgagtcatttttcttggctatgtccattgggcatagctttttattttattgtaaacaaatatataaataatgagataatagcaaaatagatttaataatctctaaaatccttaacatatagagttttcactctacctcaactataatggggctaaccttaattggttagcttctttttttgcgtaaaaaagcactctcaacttagcttatgacggactaagtgagagtgtagatgaaaagtaaggagtgaaacatttttattataatattataatagtgtggctaaataaaaattagtgtgtaataatgataattgagattgtctaactggcgactctttcctttccactaagtatttcttctccattgaaaatactgtatgtttaggcaatctcgacactttaaaagctttcataaatcgcataactctttaggggcgtaaagcccctttttgtatgcgaaaaagtctcactagtacatgactagtaagactaagttcaatgaaagaaatgttgtctataacttatattaacatacagccgcttcaattaatacaattacgtttgtattatactaacgtaaccattcgtgacgttagctgcatgaacaattcgttcagtcaggtataaaagggagtaggaaaacacgacgccttttattagttgatctaaataaggactgaacgaaacgttccccccttattcatggggtcgtgaaacgctaccccatagatgagtgaacaaaacgttcccccatatgtcgcaacttgcgacgttaggtaaatgaatatagcaaccgcttcgatacataggcatattctcaatttagacatatattaatacacgggtacagtcctaaattgggattgcagcattaaccagcttgtcaatttagcaagttggttttatttagttcatatataagtaataaaataaaagtaatagtagataaataattttacaaaatttctaaaaacaaagtatacttaagatgtaaaaagttgtttgtttttaaaaaacttgataagcgagggaacattatggattttactaaaattattatacctaatgatttaacaagatttaataaaagcgatttagacgatttagccacagagttagacatgctaagtgatatagataataaatctgaattagcagtagaaatatacaaacagtttaagcaaaagcaagacttaagtgacaattttaaagaaataattaacaataaattactagcgggaagaacagcaacaaaatggtttaaaagtgaagatgaattaaaattcgaagaagtacttgaagcattatcaagtaataatcgaaatgcaattaatgatatagatacttcaaaagtaggttataatgaaaatctgatgactagcccgagtatatttgcaattatttttgataaagaacaagaacaaatgtttatcagattcgtatataaaaatggaattcgacatgaagtaaacggtactaatattagtaaaagattaattccagcatattctactttgtatatagattttaaaaaacaattaattgaatatcgtggtgatgctaaaaaatcaaagaaaactatttctagttttataagaaatataaataaaacaaatagtaactttgaagctaaggaaaaatttagtttttcagtcgaaaatgttgccgacaaattaagcggagagttgattgacacaatatcattacctgatgctaatgtaaaaattgacaacaagaaattaaaaggaattactgaagttctagaagctatagatggttactttgaaaataaaaatatagagaaattgggaactgctttacaagatataaatgaattatttgataataacattgataataatataatgccattttcatcgctattactctctggtttggaaactgtaggattgggaagtaataaagaacttagggatactccattgtataaatacttaaatactaacctaactcaaactacaggatttataagaattcaagttacagaaaataatgtagtaaatgattacactataagagtaggaattcaaactaaaagtatatatttcacttcagatgtgaatgaaaatgtgattaaatatgttagggataatttatttaattgacatatattaaggtaggtgtgaagaatggctctaaactttgcaattcgtaaagaattagatgaatttttagatactattgcattaactgacattgagaaatttagtccaagtaaagtttctaaatatgcaggtattagtattgatgaggcatttaaatggttattagagcatgtagccgatgaagaattggagctactatgggaaattagatgtccaaattgtaatagggtacttactttaaatagtaagaaagactttgaagaatatgaatgcgatttttgttatgatgattttgatgtagaagcaaacgatttatatcctaaattcagagtttctaagaaatataaagattatttactagcaaagggaagagctgttaactctgaaaaaaagttaagtaaaactattactaatgtagatgatgatattcctctatctgatcttaatttagatgaagaaatgatacgaaatataaaagagttttcaccaaaagtttttaattttatatggaatggagatatttatatgaataacagtaacaacaacaataacaacaacaataacaacaataatattagtgatagttttaataattctaaagtagataatagtagtattcaaagtacaaatgttaatcaagaaatattaatccctaaacaacaagttgaagatttagaggattatatacaaaaaatagatgatgaagatttaagacaaatgaatgaagaatttttagataattttaaagcttcattaaaaaaatatgacaaagaaaatgcaaaaaaatggattggctatattaaaaatacagtgaatgctccaatagtacagacaatacttgaaaatttaaattaacatacggacaagttaaatatctcatttcaaacgtcactcttgtagtggcgtttttattttgaatacgttttgaatacgttatttaaaaattaatagcaatctataataatgatatagctacaaaatactgtcatatcaacgtttataaatagttaaaaatacatataaaaagtacaaactaaaccatgggaattgttggtttgattgtagctggaacaacagctaagtctttaaccgattcctacaacaggaaattagataaaaccaatcaaattaactttatttctacaatgatggctgcgatgagtggatttttattcttagcagcagatcctattaaagagggtggatttttaagtgcatttatgggcacaaaaggattattaacagcctttatttcagcctttattaccgtaattgtttataatttctttattaaaagaaatattacaataaaaatgcctaaagaagtgccaccaaatatttctcaggtatttaaagatatcttcccgttgtcagcggttattatcattatttatgcattagatttattatcaagaacatttattcatacaaatgtagcgaacgccgtattaaaagtctttgaaccattatttactgcggcagatggctggattggtgtcacacttatcttcggtgctttcgcattcttctggtttgtaggtatacatggtccatctattgttgaaccagcaatcgctgcaattacttatgcaaatcttgaaacaaacttaaatttgattcaagcaggagaacatgcagataaaattattacacctggtacacaaatgttcgttgcaactatggggggtaccggtgctacctaccctgtaacactactactattaaaatttaaaagtaatctcccttatattaagtgtgtttaccttaccgttctcattatactttctaggaacaaagtcaaacgcaatttctttaactgtactcaagattaactcctctttttgctcaacgttcaacttactccaacctttaatcaagatattatcaatcatatttaattgttcattcgtgacagtttgtgtactttccacttctgtaccagcacgctcaacttcatcaagtatctctttagtttcgtccattaaactaaaatactcatcatcttcaatgtaccctaatgaccatgatcgtgtgagtttctcacgttgtttcattattttatctatgtcgtaatctaatttaggggtactttcttctacaatatccaccttaaacttattcatgtcatatgttttgagtaactctataaatttatcttctacttcgctttcattgaatgagatagtttgaacatttttgtcttttgaacatgtatcacatttatagcgtcttacttcgtaagaatatccttttttatccgttatcttaccagcgtatagatgtagcttattatggcactgaggacacgttagaacgcctctaaagatagcatgatgttttaccttacttctatgtgttttgttctctataacgtctgtaatgcgcttataatcactttctgataatactggctcatgcgtattctcaatatacatatctccatacttagtatgaccacgtaagactgggtttttcatcaatctaataatagaagtcctattccatttcttaatcttaggtacgttgacctttttcaaattcatctgtctagcaatttcactacctgatacaccatgtttaaattgctcaacaagataatcaattacccacttatactcattaggtacaagttttccatctacattgtcatagcaaaaaggagcttctctaatatagttaccttctcttactgctgcacgactaccaaacaatgcacgttcacgtattgtagcacgttcccattcagccatagcacctaccatagtgataaataacttgccaatggcagttgtggtatcaaatacttcagtagcactcttaaacgccacgttatacttctcaaacgtttctagcatttcaagtaagtctttaacattacgtgttaatctatccaatttataaactaacactagatcataatattctaagttatccataatacgttttaatgctggtctattcattgagccaccacttacaccagcgtcagtaaacactttaaaatcgtgccaattctgaacttcacaaaaggcttttaacttcctttcttgctcatggatagaataaccttctgttgcttgctcataggaactcacctgacacgaacgtaaatagctacgttcataatacatcactcctttaaaagaaaaggatacgcagaaagtgtgtacccttattcaaatatttgatagttataaatcacttttccgattacttctatttcttctaaactttctaagtcgaaagtgtttgttttgaattcatctgaatagctaactggatctaaatgtaattttgtttcagtacgtcttacacgttttactgtatattcgccacctaaacgtaatactaaaatgtcgttattattcaatctgtaatcttgattgcgtctgtaatcgtggataattatgtatgagccattagataaaattttattcatgctatcgccattgacttgtaaagcgatacattctttaggattgcgaccattaaaagcgatatctgggacatctaattctctattatcaatcgccacgccttcgaagttgccagccgaaacctttccgtaataagttactttatgagtagtagtacctaaatctacttcgaaactatcttcatcaaaacctaatatatattctggagtaacattaaaaacttttgcataatcgtcaactttgttgacaggaaattgacgacttttgttcaaataccttgagattgtggatttcgatgaccctacttttctagctaattcgttagatgtaaaacctttttcattcattaaatcagttattaaatcaatgatttcagcatttgttctcatcttcttttcctcctaaaagactacgatttttgtttacaattgaagtatatcaccgttcccaaatgaatacaatatataggaagaaaaaactttttttatttttttgttcctaaattgttgacacacgggaacgtagttgttatgattaagacagttcttaagagaacggaattgaggtgttaaaaatgacgataaatttaaaacgtttaaaagccgaaagattagccaacggtttaaatcaagaagaaatggctaaaagaatgggttggaaaagtagaactccttatgctaaacgtgaaaatggtttagttactattggtgcagatgaacttgtacaaatggcagaaatactaggctatagcatagatgaattgcgtattttttttaactcaagcgttcccaaacgggaattaaaagagaaagtaacaagttaaggaggaataaaaaatgactgaagtcatcggcaacgaaattattttatctaactatttagattatgaagatttcacttcacatgaagaattagaaatattttcttcgattatgaatgaagcaaatccaagaaaaacagaaaattttttagatgttttcgacgatttttttggtgatagacgcacaaagccgatttggaaaggaaccactcatgaaaatatttttaatgaattatttccatttttagaaacacaagcagtttttggtttaggtaaaggtgcttacaaaaaatatggcgttttaaaatatacagctgatttttatgacgctgatagaaaaacgatatatgaaatagacggcagtagtcataaaactaaattacaaaaactaaaagatgaaaaacgtgatttaattcttgaattagaattcggaattaaaacatatcgcttttctaacaagaaagtcgaacaaatgcttattgacagaattagaaacaacaaggtggttgaaagaattgcaaaatgatttatcactagaaatcaaagcaaatgaaattcatgagaaagcagtcggattttataaaatatctgaacaatatggatataaatttttgatggaattaaaaactattcgtgatgaaaaattgtacgaacatcttggctttgaagattttgaaaaatacacttcttctaactttggatattcaaaaagaacgattaatgaacgtatccaaacagcagaaacatttggaaatgaatacgagcgcgcgcgcgcttcattaggtgatagaaagttaaaaggtttagcaactatgcctaaagaacaacgtgaagatgttattcaaaacggtatcgaaactaaagacggtaaaaaatcaattgaaaaagctactactagagaattagaaaattacaaaaaacgcactaaaactttagaacaacaaaacgctcatcttcaatctcaagtagaacaagcacaacgttcagaggagattgcgaagaaacaactagaagatgcagagagtagagagcctgaggtaattgagaagtacatggagccagaagattatcaaagtataaaaaacatgaatgaacatcttgaaagtgaacgtgaatattataaaaatttggcagatgactttagaaatgaagtcaaagatatgatggatcaacctagtaatgcagcaactttcactaaagaaaatgataaccaagattatacgccgatattattgaaaatcttagaaccatcagaactatttatacaaaattataaaaatcatattaatgaaaaagaagtaataaacaaattagaagaaattattaaaaatttaaaggagcaataaattatgaaacgagtagatattaacggagaagcatttgaacaaaacacaatgaatttaccagtaaacgaagtatataaaacagacgatttagacatgtttaaattcactaaatttaacagaaacattctttttacagatgaaatgttgaaacaagcgaaagaaggatttatcagtccaataattgtgaatgaatacatggttgttattgacggtcaacatagattagaacatgcaaaaaaagcaggagtaccaattgaatatattgttaaaccgggactaactgaacatgacattgttcgaatgaataccacacaaagaccatggagcttacttaactttatcgagagttacgcaaatcaaggctctgagcaatatgtagcattactcaatttgattaacaagaaatatgctggaacgtcagtggttatttcagttggtcgaaattcaacaggaagttctaaaggtttaaccgatttagttaagtcaggaaattttgaatttgttaattttgaacaaacactcaatttcttgaaatattacgaaagatttagaaaagaaacaaatacacctaaaaaaacaaaagtagctttagctatatatgcgttatatagattaaaaggttttgatgaagatagattaattagaaaagttttacaaaagaaatttgatgatgatttaagagttaaaggttacgaccttactgaagcattaagagagtttatagataaatacaatgacaaattaacacaagatagttcttctttcattgaatactacgttaaaaacagcggtgaattgattattgataacccgaagaaagattgggcattaaaaaagactgctaaataagcagtcaacgagtaaatattaacaaattaattataccacaagaggtggtgtctgaccacctctgataaaggaggcataatatgaacactttatacaaaacaaccctcctcatcacaatggcagttgtgacgtggaaggttataaaaattgaaaagaatactagaaaaacgacaattagtttcactaataaatcaaatttagatactaaccgtcattttggtttttctcgacaaaatctctagcgtgttcaaacgccattaaatacacagagaaagcttcatcaatcatatcttgttcgctttcatagttttcgggtttgaattcttgagtacttagatatgcattagcaaagtattgcgggtcaaatggaattttatccatgttattcacctccttaggttaataactaaattatacatgaaaggaggcataaccatgctaaagaaactaaaaatagcactcctaatcgtcatcttggcggaggagattagaagtgctaggaaaccaaatatcgaattaaatggaaagcaactagctaaaatagtgaacgatgaaaacgcgaagaatgctgaattatttattttctaataaatctagtttttctaaaagttggataagcatttcatcattagcttctctaacagcgcgagttttataaccactaattactaaagggttattgtctggattttcatctctaaatatttttatcaattctttagcgcgttcattacgttggttgaaaaactcttgtaattcatacggtttgattttactcatattcacacctccttagaggtgattatacacgaaaggagtgattgatatgaccgaagaaatgtataactactttttaaacttcatgtacaaagctggtgcattacaaaaagtaattgaggaggaagaacgtgaaaaagctaaaaataagtaaagaagataaaagtatttatatcgctggaacaatggcattagcactattcacttttctaacactatgtggagtgttcattgcacaagcattaggtataggagtaattgctggagtagtaacgcacatatttttcaacgaatactactacaaaataaaagactgaatgctatcggcaaatagcaaacagtcgaacacttattaaataaaattcaactcaatcatacaacgggaggataaatcgtgcaagaactaaatataaatcaaaagaacgcaatcgaactttcaatgcttgcaatcgagaatagaacacttaaacaacgaatagcattaaaagatgaaattatcgatgacttaatgaaagatatccgatactggtcaacgatgtaccaatcagcaaacgctagagcagataagaacgcacaagatatagctagatgtacggaggtgcatgaacgtgaaagaaacagtcacttatataattaagcgaaaagataacgacttatacgtaaccaacatgcctagccataactttccagcaatcaaatactcaaccgaattcagagatgcaaaagaatttaacggagtagataaaagttcgatagatatgacggtacacaaagctatcaaacatacgcacatagaacaagataaatatgaggaggtagaacttgatgactgaggagcaacaagaactcaacttattccaaaagatagcagatgttaaagctaatattgatggctttactaaagatgcaaagagttacaactactcatatgtaagtggctctcaagtattacacagaattagaaataagatgattgaaaacaatttattacttgtaccaaaaacatcagaagaaaattacaaacaaattgacgtaacaagatttaataaaaaagctggtcgtgagattacaacatcagaatttatcgttgaaatgaaattgacttatgtatggatcaatgcagacaaaccagaagaacaattcgaagtaactttctatgcagtaggtcaacaagacgatgtatcaaaagcacatggtactgcattaacttatgcagaacgttatttcttaatgaaattcttcaatattccaactgatgaagatgatgccgatgcaaaagaaaaacaggaaaaatattcaaaacctaatgttcaaaaagttggggagttaaagcaagatattttttctttcatagatttgatgaaagagagaggtagagaaataactgaagaacaagtgaaaaaagaactaaacattactgactatacaaaactatctaatggtcaaatcgctaacgcaatacaaaatttaaaagcatggagtaaataggaggaagtaaataatgactaatcaaactattatcacaggaaatatcacaaacgacttagaagtaagacaagctggtagttctcaggtattgaaattcggtttaggtgtacgtgggaacttcaaaaaagatgaaacaaactttatccaagtagaagcatgggggaaaccagcagaaattattagtgaatattgtcaaaaaggctctaaattacttgttattggtgaattaaaacaaaatagatttcaagataaagaaggaaataacagagaaaaagtctatataaatttagataagttcgagttcttagacaacaaaggtagtaatcaacaaaacaaccagcctcaacaacaacgaggacaagcaccagcagaaaacaacccatttgctaacaacaacgttaatgacgatatagaagaccttcctttctgattggactgatataaatgccaattattaaaaattacatcactcaagatgacggtacaactaccgttgtcattgagggtgtagaactagataacaaaacttcactcttactcgataacggttttgatgtagaagtcgatgtcattccagttgatccattcagaataacgaataaacagcgtaagaagatattcgcgctcgtcaaagatatagaagtccatacaggtatgccaatggactacatgcgccatatgtttatcgaatatgtaaggacgtattacggatatgatgaacgcatttcacttagtaactgcacacgtacacaagccagtcagattatcgaagtaacaatcgattgggtattcgctaacggaataatactcgcttacaaaacaagtgatttattaaaaggcgataagtcgttgctttactgggcaacagtcaatcgcaactgtgttctatgcggtaagagtggtgctgaccttgcacatcactacgcaataggtcgtggtgctaaccgtaagaagatgcagcattacgattatgaagttctagccttatgcagagaacatcattccgaacagcacaacataggtgttaagtcttttgatgagaaatacatcttacaggatagctggatcaaagtagataaacgattaaatagaatgctgaaaggagtgacttcatgagcgacagattaatagatataactggtggttatggaactgtctataaagaagttttaaaagacaaagaattaagcattgaagcaaaagcaatttacagttatttatcttcttatgctggaggtaaagatacagctttccctagtatcgggctaatatgtcacgaattgaatataagtgaaaaacgtttctataagcaccgtaaagaacttttagataaaaacatcattagtaaaacgcgagaaagaacaaacaacggttttagtaaaacgatttacacaattaatcatcatttcgtacacggtcaattcgtacgcgtacgaaacgtacacggacaaaacgtacacggacaaaatataggtactaagaataacagtattaagaagaacaatattaagaataacaatagtaagagtgacacgtcacaaatctttcagttggttagtaaagaattagaaatgatacaaagtcctttcaaagtacaggagttagaagatgaactcaatcttattaaaggaaacaaactagaaataacaacagtagctattaactactgtaaacaaaataagaaaggtattaactacctaattaaagtattaagaaactggaacaacgaaggtgtagatactaaagagaaagcactagctaaagtgacgcctaagaaaaagaaatctaatgaaactgaagatgtatttgcagcaatgaaagagaaattaggtgttaacgaatgagtatgactaaacaacaagcattcgaaattatagataaagtcagacgtatttataatatggaattcgatactcctaaattagaaacgtggatagacgtattgagtgaaaacggtgattacgagccgacacttaaaacagttaaaaactacattaacagtggtaactcatatccacctaacttacctaaaatcatgagaaaagcacctaagaaaatggaatatgaagaagaaccagaagatgtaaaagagcatcattggaaaatgaaaaatgatccagaatatgtagctgcaagaaaaaagttactcgatgaatttaaagaacagctaagaaagtttgaggtgaacagctatgaatgagcgtagagatattgaaagtacgattattgcaagtttactcaagaaacctgaacttatcgaaaagctacgtgttaaaccttatatgttctattacgacgatttcagagtgtttatggaatatgtgtttgaagtcggtaaggtagatcatcaagaaatattcctagaaacatcaaagaataaaaatttcttagacttcgagacgatacaaaaactctataattcagatttcattggctatggcatatttgaacgttatcaacagaacttattagaagcctatcaggtatctcaagctaatgaagttattaacgagtttaaccaatcacaaagtataaagtcatttgaaacaatgcttactgacttaaatgaagtatcaatgattagcgcaacagatgaaacaagcacaaagaaaatcgttgatgagtttgtagaagaattgtatagcgatgaacctaagaaagtgattaagacaggctatccactaatggactacaaaataggtggtttagagcctacgcagttagttgtaatcgctgcacgaccttcagtaggtaaaacaggctttgcacttcaaatgatgcttaatatcgctaaacaaggctataagacatcgctatttagtttagaaacaacaggcgtagcaatattagagcgaatgttatcaaccattactggtattgagttgaaacgtattaaacaaaaagctgatttaacctatgacgatttaacaaaattaaccaaaggcgcaagcgaaatattaaaacttgaaatagatgttaattcacaaagtaatgtaagtactcaggaagtccgtaagcaagccatgaagaacaaagataagcaacaggtcatattcatcgactatcttcaattaatgcaaacagatagcaaattagaccgtagaaacggtattgaaaaaataagtcgtgatttgaaaatcatagcaaacgaaactggagcaatcatcgtattactttcacaactcagtcgtggtgtagaaagtcgtaatgacaaacggcctatgttatctgacatgaaagaagcagggggcatcgaagctgacgcaagtttggccatgcttttataccgagaagattactacaaccaagatgaagaagatgaactcggtaagtcgattgttgaatgtaatattgcaaagaataaagacggtgaaacaggtgtcatcgaatttgaatactacaaacgtacacaaaggttcatgacatgacggttatcgaatataagaaattactcggaacgatgtaccgacaagattatagcaatgatcaacttattggaacgttactgattgaagttggtcgagctatcaatcgcttgctggaagagaaaaagatatcgccgttcgatgactatgagaaagtgctaaatattattgaacgtgagacgaaatggagagataaagatggcaattatcgaaaagtattacctttatagaccagacggaacggaagaaataaaagtagagaaacgtaagcctaatgtgaatatcgttaaaacactcacaggcgctcattttagcgatgaatataaagagatgactgatagtgagttgaaacgtttcaaaggcgtgtatgagcttctatacgaagaagaattagggttacaagcaacgatatttgatatgtaggagtgacaacgtgagtaaatacaatgctaagaaagttggatataaaggtgtcgtgttcgatagcaaagtcgagtgcgactactaccaatatttagaacgtaacttaggtaatggatatgatcgtatcgagttgcaacctagatatgagttgatacctaaactcgataagcaacgtaaaacggaatacatcgcagacttcgcactattcaaagatgatgtgctggtcgaagtgatagatgtaaaaggaatgccgacagaagtagcgaagttgaaagcgaaaatgtttagacataaatatccgaaaatcaaacttacatggatatgtaaagcacctaaatacacaggtcaagagtggataacgtatgaagaactactaaaagcacgcagaaagcgtaaaaaggagaagatgaagaatgaataacatttggaaagattttgcgaaagaatatatgccagaggataaatttgaaatagtatgcaaaggaattaaaaaatcaaaaaatgtagtagatgttaatcatgaattttctttaaacagtttccttaatgtcatttataacaaagaagatagaaaagtaggaatgagaataacaagtggttatcaaaacgcatttgatgtttgttacaaaaatgaaaagccaattattaatgaaaaagatttcggaaaaatagatttaatattcgacaacaaacttagtattgaaaactttatcgaaactgcacaactcttattaaaagcatatgacgaaattacgaaagagagtgatgagtaatggcaacagtcaaagctgaagtattaatcagaggcacgattgagttaccagcttacgaagaaacagatgaagaaatggaatacacaatcgagcaagctaagaaaagtccagaagaaattttcgacgatatcgacattaaagatgtagattttcgttatgagcattggaagtgatcgtatgtatgacagatataaaaatattccagatgtatacattggcggtaagaaatatcgactatgtgacgtatataagtattttgatgtcggtgatgcgactgttcgtaaaagatactacaaacaaaaattaagaggttgggaacttgtctatggtaaaagcaaggttcccgttgaaattgaacaaggtaaggggataggtgaatgagagttagcgaattaaagagaaatgatgtaataaggttatatagtcatgatgaatctcgtagtgttttagcgattgttgatgaagtaggtggcactaacaaaaattatggtatttacttttgggcaaaagttgaaacagaaacaggttggaaaccattgataagtaataattggaaatttgtgaaagtaaacgagcctttcacacgtaaggtggatatgcaggaagaacaagacatggtacacgaaccacctcattatcagttcggtaagttctcagcacgaatgattatcgaattagtaggcaagacgtataaatcagcgtcagtcttttatcacgtaggtaatgcactcaaatacttaatgagagcgcctagaaagaatggtttgcaagatttaaagaaagctaagcaaagtgttgagtttgcgatagagaattgggaggcagaagaaaatggcatatgaagtagatttttggtatcaatcgcaaaacgcttgtcaaataactacaacgttcactccgttttctgacgataaagaagaaagtatttatatggataacgaagatttctttgcgatggtcaatcaatttagtgatgccagtttgatgtatgaagcttggagaatattaagaagtcaattagaaggagaaagtaaacaaaaaatgttggaaatcgaaaacaatttaggaattgatgttgataaagaattaaaaaatatgtatgaaagatcaatggaatgataaggagaactaaaaatgaaaatcaatattgaaaatgatattacagctgaacttttgctacaaggcattaaatttcatagagaaacaaataaagatggggaagcgtgcaacagaataaaagaattagaaggactacttataaatataataggttatttaggttatctcagatatgaaacaacgacagaatttaataatgcgagcggtaaagatattagggaaaaaatcgataatttaattaaaagtgttgaagatgagatatacgaaattaaagaagaagaggtagaacagaatgactaaatataatattaaggaggactaactatggtgtatatgtacgagcctttcactcacacagtaaccaaaactgacttatctcatctacacaacatcacaggtattccacacaacacactatggtatcaaagcaaacatggtatctataacgataaactaaaatgtttcttttcaggtacgttacctagatttaagaagaaacaagagtttaacgaaaaagttgtcgcaaatgatgagatttggaagtatagcgataaatatgatctatatgtgagtaacttaggaagaatgaaaacgccgaatggtaaatataaattcgctaacggttgtaaaggtgtaattacagtaatttataagaatagtaaatatcgtgcagcagacattgtatacgaaacatttatcggtggtttaaagacaggttatcatgcctaccctagagatagtagatataacaatcttgtagcagataacctattcccttccactattgctaagtacagattatatcgtagaaatacagggcgttctaaacctctttacttagtggatagcaacaatgagattgtagaggagttcgcaagcacggtagaggcacaaagtgtattgttcgttgaccgacgacatattgcaagaagatgcaacagtaaatgtgtaagtgacggactaatgtatgtgtgggcagacgaatatgaggagttgaacgcatgatattatccaacacaattaaccaacgctatcgctatgctacacaaggtaagacacctacacaaatacagcaagagctacgtgagttaggtgtcaacggctttgtggttaaggtagcaggaagtagagtgacgatgaaagttagtgagtgtgacataaaaaggaacagggagtgttttattaatgggtgaaatagtagatatgatgttagatggtacattatgtgatttttgtggttgtttgatggacgacttaattgttgaaggtagcaaagagttaaaagaaccaccaggctatcctagaacttgtgaagattgtcaaaattttttattggaggataactaattggacatcaacaatctctacacctacaaagcaacatgcaccaatgttgtggacggggatacgatagatatattacttgattatggctttgatacctacgctaaacgtcgtgtacgtttgctaggtgtcgatacgccggaaagaggacaggataagtttaaagaggcaacagcgttcactagagaatgtgtagaacataaagacatctatgttcagacatacaagagtgatgtgttcggtaggtatcttgccaatgtatggtacgaggacgggcaacgtagtttgaacgatgatctaagggacgcagggctattgaaagaaaattcgaaatggaatgagggataggaatggcagaaccaacattagatgaattagttgcatttatgaaaaagcaaggagtagaaaaagtggatagtatcactgacgaaaagagtgcaattaagcattttagagcagctagtagagtatataaagaagaacgtgacagtttccgtaagcaacgtgatgaactcatcaatgatatggcagaagtgaaaaggaaggcagaggcgtttgacaatataaaagaagctgctgatagtgaaaaattaaacggctattcattatatgataatgaacgttttatagatagattgtgccatgtgttcgatgaaatggaggctaaccatgaaagataaagactataaacgtgcatggctagagttaaaaagaaaattgttagaagaatatcctagtttacatgatttacattggccagaaggtaaatattacagcgattatgataatggtcgattagaaaaactagagaatgtacttatgaaaatggacgaactcgatggcactaacgattttaaaaatttattaagtgatttggaggaacaataaatgtcaattttaccaattaaaaaactaagtgagaaagcaattttaccaacaagagcaaatccgacagatagtggattagatttatatgtagcagaagatacaacaattttagcgcatagtacaaaagtagtaccaacacacattgcgattgatttagcttatggatatgaagcgcaagttagaccacgttcgggtaattcacttaaaactaagttacgtgtagcattaggtacaatcgaccacacttataacaaagaaattggaattatcacagataatataggtgatgaggcaatcgtagttaaagcaggcatacgcttagcacaattagtcattgcaccagtaatgttaccagagccaacggaggtgcaagagtttgatgaaatatcagaacgtggagcatacggaagcacaggagagtaaagaagatatttatcaacgtgtaaaggaagtgcttagaagatgagtgttaaaaaagctagaaaaaaaccagtagaaattgagtttattcaatttactaataaagatagtgtattagaaatattgctatgggctaggtctaaagttaagtacaaaactactaaaggttattttcttataaatactttagaaggagaaatgatagctaatgtaggagattatatcgtaaaaggtgtaaatggagaattctatccagttaaacccgacatatttgaaaagacatacgaggtgttgaaaaagtgaaagactttgaacaaccgacaataaaaatattaaaaagattatttaaaggtaaagatgaaactaacattcatatatctcatctgaacctagtagattatgaagttattgaaatgataactaattataaactttcagaaactcatacaagaaaccaacattttagagatgtagtgactttgaaatttaaaaagaaagagtaaagaggtgctggggaagtgacactagatttaattaactttgtttggatagccatgacgtgtttgattgttgtagcacttgttaatgtagtagctcatgtttgcacgatgattttatttactaaagataagaaaagactgaaagaattcagagaaaagcgaaatagagaatggatagagaaagaaagagaatttgaaaatagaatgcaagaacgtcgtgaagaattctataaaagaaacaaacatattactaaagattttgataaacactttaaggagtgaacggtatgagtgatttcaaaataataacttcagaattaattagcaaaggtattgagtttgaaatagaagatgacaccttgattgtcggcgattgttcagtaatcaattatagcgacgtgtattttttaaaattgtccggaattaatactcaacaaggaatggctgttaagcatcctattgttatagcagatttcttatctagttattattacttattagaagatcataatagtatcactgtaaaagatattaattttaaaagtgaggtgcgtagtaatgattaaaaggataatcaaaatatggttcatcatcgctgtgtatgaacttagtaaatatataactaatgaactaatcgttatgtggcagagcgaagatgatattgatactgcaccaaatgattacgcattaaatggcgatcaagcagatttgaatggagtgagtcgatgacttggtggatagtattaataccgattgtgtacttagtatggatatgtataaaaagtaagggggaacgtaagtgataacgattgaacgtcatgatattagaaagttagaagaatacattcaacatgtagaacgttatcgtaaggaattaaaggtttgtgagtatgaattattagaaaatcacgaaccagagaatgtaggtgctgggaaaagtaatctacccggtaatccgattgagcgtcaaacgattaagaagttaagtaataagagatacgtaatgttaagtaatattgtaaatggcgttgataagttagtggaagaagcagacgaagatacgcttgatatgattaacaaacgatactgggaatgtccaattggttgttatgagtgggaagatttagcagaatactttggaacaagcaagtcaagtatattaagacgacgcaacgcaatgattaataagttagcagaattaatcggttatgtgtaaatggacttgagaggtatataagttcgcttcaaaaggcgctatcatgatagtgtaagttctaccaggtgacttacatgtaatgatttaattctttgctgaacaattcaaaaacatactcctttctaaaatgttagtttttcatttactcatccctaaaaggtaaatgatgtgacctatctgagagaacactcaggtaggtttttttgttgtataaaaaaataaattaagtgaataacgtgagagttggtgatatatgagatgactaaaatgctaaataatgctaattttgacgactttttaaagttgagcgaaaaacagcagaagtatatagaaataaagaatgaaacaggacaaacagataaaactatcgctaaaaaaattggcgtcgatactacgacgattagtagatggaaaagaaaagaagaatatcagctaggtttaaaaggatatcaagcatattatcttagtgaaaaaacaccacaagcacttttaactatgacaagattgttaaaagctagaagtgaattagttagatttcaagcagcaaaggatatacttgatcgttctggttatactccaatagacaaacaagaattagaagtaactacccctacaattatcaataatattccactagaggattaattatggaaatacagttagataaaattgttggcggaggatataaccaattctttaacaataaaaacttttacagagttgtgaaaggctctaggggtagcaaaaagagtaagacaactgcattaaactttatatatagattaatggagtatgagtgggctaacttacttgtagtcagacgcttcagtaataccaacaaacaatcaacatatacagatttgaagtgggctactaaccaattaggtgtaactcacttatttaagtttaacgatagtttaccagagattacttacaaaccgactggccaaaaaatattgttcagaggacttgatgatccattaaaaattacatcaattacagttgataaaggaatattgtgttggtgttggatagaagaagcatatcaagttgaaacctacgataaattcgcaacgcttgtagaaagtattcgtggtagcgtcaacagtccagacttcttcaaacaaattacagttacattcaacccttggagtgaacgtcattggcttaaacctacattctttgatgaagatactaagctaaacaatacattttcatacacgacaacatttcgagtgaatgaatggcttgatgatgtcgatattgcacgttatgaggacttgtacagaacaaatcctagacgtgcaagaattgtatgtgacggtgaatggggagttgctgaaggacttgtatttgataatttcgaagtgaaagagttcgactggttgaaagtattcaaacggacacaagaaaaagcacatggtagtgactttggttttactcacgatccaactacattgattagtaccgttgtagatataaaaaataaagaattatggatatacgacgaacactatgaaaaaggaatgctcactgatgagatatatcaaatgtatgtagataaaggatataaagacgcgcttattgttgcagatagtgctgagaaacgtttgattgcagaaattaagcgtaaaggtattcctaacattaaaccgtcaatcaaaggacaaggctcaatcatgcagggtgttcaatttatacaaggttttaagatatatgtgcatcccacttgtgtaaatacgattgaagaactgaatacttacacattcgaacaagataaagaagggaattggctcaataaaccaattgacgctaataaccatttgctagatgcacttagatatagcctagaacgtttccatttaccacataaacagacaaaaacaaatgttaggaagaatattagcacaatcaaatcaatgggcttataaggagggataatgcttgttaaaagtaaatgaattcgaaagagatgcagagtaccgacaacatcgagataagatatacagacgtgacgcagtagaaacatatcgttacgacggtacattaagcgagatactaggtgattatgatttcattagtgaatgtattagtcatcatctagaggcgcaagttcctagattacagatgcttgatgattattatcaaggacttaactacaacatcatgcgtaatcgtagacgtagagaaagacacttagcagataatcgtgcagcacatgattttgcatcatacattgcagactttattaatggctattgttttggtcatgcgatacaagtacaaacagaaaatgaagatacacaagagaagattaacggactacataacctaaatgacattgatacacacaaccgttcaattggacttgacttgtctatcttcgggcgtgcttacgaatatattatccgtaatcaagatgatgaagtgagattatacaaatctgatccacgtcatacatttgtgatttacgataatacgattgaacagaatagtttaatcgcagtgagatactggcaaacgtcaacgagagaatatgatgatacagatatttacaatgtagacatcattacacctaacgcaaccaatttcttctatgcgaataagtctactaacctatcgctgcaagaacgtagaccaccagagccacattcgtttggtaaggtaacaattacagaatttagcaataatgaaaagcgtcgtggagactttgagaaagttattccactcattgacctatatgacaatgcacaatcagatacagctaactatatgagcgacttaaatgacgcaatgttattagtaatcggtaatatagaacttgatagcaatacagcacagttacaaaaagatgcgaatgtattccacttagcacctccagagtacacaaatatggatgagagaacgactgagggtaatgtagacgctaagtacatttataaagaatatgatgtaaatggtgtcgaagcctacaaagacagaattagtcgtaacattcatatgttcactaacacaccagatatgactgatgaaaactttggtggcaatcagtcaggtgaagctatgaaatataagctatttggactagaacaacgcactgcaattaaagaaggtttattccgaaaaggtttgcgtagacgttataaattaatcggtcaaattatgagtatcaatcgtgaattagataaagatgctattcaagatttaacatttacatttactcgtaatgttcctaagtcagtgaaagatgaaatggaaatgtacttacaagctggtggacaaatcagtcaacaatcattgatgtcacttgtgtcgttcattgataacccacaacaagaaatggaacgtattgaaaatgaagaagatgctcaattacaaaaatcagatgaacgaatgtacaacttagagggtatggataatcaaaccaatattaaggagtgatagtccatgacctactgggaagatagagcaaaggaaattattgatgaagaaagtaaatcagattatgagattgctcaagagatacaacgtattgttgatgagatgaatgaagatattgaagatgagatcaatcgtttctatgcaagatatgcgattaatgaaggtatttcatttattgaggctaagaagaagattgatgcagtagatgttcaaatattccaacagaaagcgaaacagtatgttgagaataaagatttcagtgataaagctaatgcagaactaagagcctacaatactaagatgtatgtaagtagagagaaactactacaagcacaactaggacttatcgtgacttatgcttatgcacagatagaacaatctatgtataactacatggagagtgcttattatcgtgcattagagcaacaagcaggtatcttaggagaaacgcttcaagtatctatcaatgacgttaaaacgatcatattcacaccatttgaaggacataaatggagtacaagactttggtcagatatggacgtggtaagacgacacgtacaaaagaccacacgtcatgtattactacgtggtagacacccttatgagtttgtgaaagacttacgcaaagatacaggggcaacaacttacaacatgaaacgtctattacttacagaaactgcaagagttcaaacgttagcgtctaaacgtcatatgttagaagaacacggtgcagaagctgaatatcaatttgtagcaaaaatagatagtaagactacgaaaacatgtagaggtttgaataacgaaacattcaaagtaaaagacatggttccgggagtaaatgctccacctatgcacccgttttgtcgtagtgcagttgtaccatatgtaggcaactggcgtgataagttcttcgaagaacgtaaaggtaaatataacctaagtaaatatacggagtgatgagatggactattcaaaaagactagatgacgttatggatgaatttttacaagtatttgcaaaagatccaaatgatattttaactgacgatatgacagattacgataagattaaaaagttagaacaagctatacaatcaggtgcttctgatgagtgaatttcaaacagcacttattgatgtattaaaagatattcatcatgagttaaagcgtctgaacgatacaaatcctagtaaccaagcacaagcgaaacctaagcaagataaaaagaaatcattcgagcctaaaaactttatttgaggtggtactcatgagaagtcgtaacgtgaaaatggtgatccaattatctcgttggtagcatacgttagctacttgacctaagtaagtcattaaactgctcataaacatactaataactaattataagggttaagaaacttgtttccctatcaaaataaatctagcgcactaatcgggcttaactgactgattggggcgctttttttatgcgataaattcgagaacttaacgtttatgaggaggataaaaaatgaataaagatgatttattgaaattaaatttacagttttttgcagaaaacgaaggcgattctgaaaaaactaatgaaaatgataataaagagtcagaaaacgataacgaaagcaagcaagaaacttatacaaagaatgaagtagactcggctatcagtaaagcagtagacagcgcattgaagaaacgtgagcgtaagcaccagcaagaattagagtatgctcgtgaagaagctagaaaaaaggctgaaagctacgcaaaactaactgaaaaagaaaagcgtgacaaagaaattgaagaacgtgagcaagcgttagctgaaaaagaaaaagagttcaaactacgtgaacttaaatctgatgtcgaaagtgaccttaaagataaaggtttacctacttcatttgcaacgtctcttattcatttagaagatgtagaaaaaattaatgaagctgtaaaagaaatcaaagctgattttgacaatgcagtacaagagcaagtgaaagaagttactcgtcaatctacaccgaacaatcaaagtagtagtttttcacgaaaccaaagtagaaaagaaaaaggtttaggcagtattgctgatgaagtaagaattattcaataaacggaggaattaaataatgaatgaaactaacaaattaaagttaaatttacaacattttgctaataacgatgttacaccacaagaatttaatccagataacgttatgatgcatgaacatacggaaggtgaattattaaataacttcactaaaccaattttacgtgacgttatggaaacctctaaaattatgagattaggtaaatttcaagaaatgaacggaacagaaaaagagtttgtcttttgggcagataaaccgggtgcttactgggtaggtgaaggtcaaaaaattgaaacatctaaggctacatgggttaaagctaacatgagagcatacaaattaggtgttatcttacctgttactaaagaatttttagattatacttattcagatttctttgaagctatgaaacctatgattgcagaagcatttgctcgtaaatttgacgaagctggaattttaaatgtaggtaacaatccatttggaaaatcaattgagcaatcaattcaggctactggaaaagtaattaacgctgaatataatggagagaatttattggatttagaggcgttagttgaaaatgatgactatgatccaaacgcattcatttctaaacgtcaaaacagacgtgaattaagtcgaattgtagatagtgtatctgaccaacgtttgtttgaaaaaggtaaaggcagagatgcaatcgaccaattagatggtttaccagtattgaacttgaaatcaccagattttaaagaaaatgttatctatacaggcgatttcaaccaattattctacggtattccacaacgtattgaatataaaatttctgataatgctcaattatcaactattacaaataaagatggctcaccagttaacttatacgaacaagatatgtttgcattacgcgcaacaatgcatgtagctgttcacattgcagatgacaatgcatttgcaaaattcgaaggtattcctactaaccctgaaacagctacaccacaacctgaaactgtctaattaatctaaggaggtctgacatatggcttattcatacgaagtagtacgaccgtttgttgatgcagaggataacaaaccatatgaagttggtgacatatatcttactgacattacagatgaacgtattactcaattactacatgctgataacaaatacaataaacaatatataaagttggttgttgatagtaagaacacaaaagcagaattaattgaaattgcacataaacatggtattgaagtatctgaaagtgatacaaaagcagacatcttagacacattggagggataacatggcaacattagataatgttaagctattactttcaattaatgacaatgtccaagatgaactgttaaaaagaataattgataacactgaaaagcgtttgattagcttgcttcctatcggtatcgaagaagttccagatagattggaatacatcgtcgaagaagtagcagtcaagcgctttaatcgtgttggtgcagaaggtatgacacaagaaagcgtagatggacgttctaatacatttcaagcaaacgactttgatgaatatatggacgtaatagatcaatatacaccacgaacaactgaaaaacgtgggacaggtattttctattgagatataacaaaagagtcgtgtttgctaaagaaatgaaaggaaagtataaccctaaaacaagcaaaactgaaacatacgaaaagcgctacgatgcaataccatgtaatatcagtccattaagtccacaaaaaacagtggtgcaatacggagacattaacaaagacattaatgttatacgtttaaacggtcgttttgagcctactgtgacacatgcttatattaatgatactaagtatcagataaccaaaagaattgattatgaacacgatacagtgttttatatcgaggaggttaagtgatgcgtttcggtggtggagatttagacgacttaatcagagattttgaccgcatgcacaatgatattgatgatgatgtagatgaagtgctgcataacaatgcaattgaatttagtgcagatacagttaaaagtgctaaagaagtaatgaacaaaggttattggactggcaacttagcgagaatggttgaagatgctaaagaaggacatcttaaatacggtatcacttctaaagcaggttatagtggatttcttgaatacggaaccagatacatggaaccagaaacgtttatgttcccagtctaccaagagttcacgaaaaaagtcagagcagacctcgaaagattaattaacggttaggaggtatgcgatgaaacaatcagtgaatttgcaattgttcaattatctttatacaaggtttgaagaacttggcgtgcctatcattcgcactagtgaactcaatcaagaattagcttatccgtttatcgccatccaaagtattagagatgatatacaccgtttaacttttgacacttacagtggtagtcctactgcaattatccatatatggtgtacggaagatgataaaggtaagaatgatgagttatacagtcaagtacagtctattctactagatgagatacaactagacggatatacattgacactcccccgaattagtgtgaatgaaagtacagaacaagaaactaatcaaacgttgtcacatacaactataagtgtagagtacgcaagtcattaaattggcttgcgttttttaatacaaaaatttaggaggtattcaacctatgccaacaaaacaaggtactgatgaattagtattaattcgtaaagtcggcgatagaaaagacgctaacaaagtaatgttagttactgagttagaacgtgaaactgaaaaagatagagatacagaagctacatttgatggctcagttaactctggtggtacattagagtctactgtgacaattaattgctacatggaccaaaaagacactttatgcgatgaaattgaggacgctacggaagatgatacaccatatgaattatgggtaatcaataaacgtgttcaaaatagcgaaggtaagtacaaagctgaatatagacaaggttattggaataatatcactcgtactaatgaagcagacggtattgctgaatttgaaacagaatatagaacatatcttaaaaaagtacgtggttgggctacattaccgcaagcaattgaagaaaacaaagctgcttatggcttccatgatactgttgcatctgatccagcagatgatggtttggctgatagcattccacaaccaacagaagttgaaactgtataaacatgaggggaatatcccctctttttatttgcgcaaataaaaaataagtgaggtatttagtttatggaaattacttacaacggtagaaaattagaattatcatttggatttaaagcattaaatgctattgatagaaaattaggtgttgaagcagaacagatgaaatttggaatgggcttacagtctacaattccttttgtattacaaggaaatcctattactttaggtgaatacattatagctatgacatcacatcataaaaaacatcctactgaaaacgacattttagatgtcctagatgatattgctgaaaatcaaggtttagtagaatttgccgaagaattagtggagacactgggaaagagaccttcaacccaaagcctagtgccagacagattcaaaccagcgaagaaagacaacaagaaaaaatagaaaatgagcctttaacatacgaaaagattattgtgctatgcatgagtaaactcaaaatatatgacttaaaacgcatagaaatgatgactttaactgaatttaactatcgtatgtgggcgtatgaatacgaacagcttgataaagatatggaaatgtacaaacttgcctttgctatacgtgatgcacaagctgaacgtaagaaacgtggtggtaagaaaggtgaatctgagtatgtattcaaaagtgcgaatgacatcatagactatgaagaaaatatcaagcgcttaaataaaggtgaagccattaaatatggctcagactcaaaaaaagaagttaacgcaccatctgatttgctcaaaatgattgcaagtcataacaattctttaagaaaggagtgataacgtggcagaggcgaattatagtattaaagcacagattgaggcgaatacccgtaagtttaaaagcgctattcaatctgctaagaaagtggctcaaaacttcaagaaaacgcaagaatcaatcaaagatactaaattagatggcgattcttctggagtaatgaaagcagttaaagcagcaagagatgcagtaaaaggttttgataatactcatgcagatgcagagcttgatgcagatatatctgatgttagagaaaaagtcgcacaagctaaaacattagttgaaaaattcgatgcttatcgtggtgatgcagagttagacgctgacgtatctaaagctactgcaaacattaagaaagtacagaaatatttagatatgtacgagaattctgatgcagaagcagatgcagacgtaaatattagaaaagctattacacatatttctgagttacaacataacctagatggtatcgacggtagcaagtattcagctgttttagatgcagatgcaactagagcaagagaacatatcaagatggctaagaaacaacttaacgacttcgctcatcaaaaagctaaagctaatcttgaagttgatagcgcaggagctattgcacagataaaagcgtttaaagctatgctacgttctattcctaaccgtgttcgtactcggcttgatgtagatggtggcaactcattaggtttctttagatcattaggagcagcgattgacgagtcaactaaaacatgggataaattagcgactaaaattagaacaattggtactgttctaggtaatatgataaaaggcgttctaatttctaacatctcattacttgttccagcaatcgctagtttagttccagcgcttatggcagtgttaaatgcaataggtgttgtttctggcggggcgttaggtttagctggagcctttggagtagctggtgctggtgcagtagcatttggtgctatgggaattagtgccttaactatgctagctgatggaacattagaggctactaaagaaacagaacgttacgaggcttcgttagatagcttaaagagcgcttgggctgatcttatcaaacaaaaccaagcgcaaatatttaatacattagcaaatagtattgatactgctaaagttgcgttagctggacttacaccatttatcaatggcgtatctaaaggaatggaacaagctagtgctaagatgcttgactgggctaaaaactcacaagtagcacaaaaattctttgagatgatgggtacaactggcgtaagaatatttaacaatatgttagatgctgctggttcattcggtagtggcttagttagtgtacttacacaaatagctccattagctgagtgggtatcgcaaggctttaagaaaatggggcaagcatttaatgaatgggcgcagtcagttgaaggacaaaacgcaattaagtccttcatcgaatatactaaacagaatttgcctttaataggtcagatatttggctcaacatttagaggtatattcaacttaatgaaagcatttgctcctaacactcatttagtattacaaggtttagcagatatggctaaccaattcgaacaatggagcgcaacgattgcagagagtgatggatttaaaaagtttattgaatacgttcaagagaatggtcctaaacttattcaattattaggtaatattattaacattatcattaacgtagcgactgctatggcaccatttgcagctgcagtattagatgttgctatcgctatgacagattttattgaaaaactaactgaggcgcacccagcaatcggcataatgctaggtttaattgcaacattagctggtatctttatgacgttaggaccaccaattttaggcgcaattgactttattgggacatttgtaaaagcaatcacaggcgcagaaacggtaataaagggcttctcagtaatcggcggaattgtagcagatgctatggaacttgtaggtgctgcgttagttggaatagaaggtccagccttagcagttgtagctgtagttgcagcagtcattgcaatattcgttggtttatggaactcatcagaagtagtcagagatgcagttacaggtgcatggaaagctatatctggagcagttggagacgcagttaaagcagtaatcaacttctttaaagatttaataggtcaaatggactatgttaaaggtgcagtcgaatctctcggtgctatgtgggacggtttcgttaccattgttgaaggtgctatcaaactgttatcacctttatttgaatctgcatttaacgcaatagtgaatactgtaaaaatagcttgggaagttattaaagcgattatcacagtagctatgcatgtaattgttggtacaattaccgctttacttcaagtgttaacaggtgattggcaaggcgcatggcaaacgctccaagaagtaggtcaagcaatttgggacgctattgttcaagcagcagtaaatatcttcaatattttaaaagatgtattatctcaatcatggcaagcgacagtcgatatgttctcgactatattcggaccattagcagaaatcgcaacaaatatatggaattcaattgtacaagctgttttaacagtagttgttcagttgggcgtatttttaatgaatatttggactaacatcgtaacaacagcgcaaattatttgggctacattaattgtagttgctcaaacagtttggactgcaatagtaactgcaatcacaacgatagttacaactttaggaacgatattatcgacaatttggactagcattgtgacggtagctacaacgatttggactactttagttacagttgcgcaaacgatctggactatgttagttacggttatttcaactgttgttcaatcaatattaacagtggttacaacgatttggactacgttgttatctgttacttcagctattatgggcgctatcgctagtgtgatttcttcaatttggagttcaattgtaagtattattagttctatcgtttcatctattgtaagttttgtttcaagtggttggtctacacttatgagcataacttcatcaatcatgagttctatttctagcgttatatcaagtatttggtcgtcaatcgttagctttatttcaagtgcagtatcaagagcagtaagttttgtgactagcggtttccacaatatgctaagcgcaattatttctgctatgtctggaatggtaagtgcagtaattagtggtatgtcaaatgtcgttaattctgtaagaaatggcgtatctaatgctgtaaatgccgctcgtagctttataggtcacatgagacaagtcggtgttgatttaattcaaggcatgattaatggtgttgttagtatggctcgtaatttagtaaacgctgcacgtaatgtagttatgggagcagtaaatgctgctaaaaacgcattacacattggctcaccttctaagttgttcaaacaatttggtgtatggactatggaaggtttaggcattggaattaacaaagaaggtaaaaatgtaatcagtggtatgggcagtatggcaaactcaatcacagaagcatttaatagcaatttagcagtaccagacattacttctaatatgaagaaaattaatgctaatatgaacgctcaagtccaacatacacatactgttcaaacaaacccttcacaacgtgttgttcgtattgaaatggatgtaaacaacgaagcattagaagcaattgtaaatggtcaaactgcaaatgatgatacggtattttcattctaaggaggtcgttcaatggatatagaaattaagaaaaaagacggacagcgttatactttgaacgacttcggtttcaaagtgacgaatgtgaccgttgaaagtattgaaaaagaaacggattacgagaaaaaagaaaatacaagtggtcgtattcttctaagtagtcagtatcgtaaaagaactattacagttgattgctatgtagtttctactaaactaaacgataactcacgtttacgagatgagttttactcgctaactaatagtaacgaacctatttatattagagagttaagacggacagttccacttaattatcgtttcgtacaacctactgaagatgactatcaagagatagatgaatataatgttcttgtatttaatcacgagccatttaacgacaatcattatgtgaatggtagacaatatcaagttatgtgttcagatgtagttgtacccgaagaaaatggtcgtaagattaatttctcaatcaaatttgaaacagtagaactgccgtttgctgaaagtatcggaacatcattggaattggagaaacgacctgatagagaattatggtcaaatgatatgttaattccttttgatgaagaagatgcacgtcgtaggtattcatttactaatgtatacaacaattcagtctactatcacgggaatgtacctaatgatcaattcaatttatttaaaaaagtaacagttgtattagggaaaaatgttaaagcaacggaaattttcaaatttacgttaggtaatagtgatgttatgacaatcgaaggtgctaatttaaaaaaaggcgacaagattgtctatgacggtgtacaaacatttagaaatggtgttcctattaatgacttagcatcaaatgcacaaccaaagttttatccgggttggaataattttgaattcaatcagcaagttaaatcagtaacatttgacttgaaattttattacttgtgaggtgtagacatgccaatattagttactccaatacgtgggcgtagtattccattgtacgtgtctactaccgaaacatctaaacttggttctgatataatactacaatttgaaattgttgaagatgagtttaattatcaaattgtcagaggtttgcaaaaaagatggactatatcaagagtacaaggtccgaaagacaaaagagaatatgtagtatttattattgacagacagacacatggtaagaaacaacgtgtgtctgtctcttgtcgttataaaccattagatatcattaaacacactcgtatttacgacacaatagatggtagtttcactgctgataaatttcttaaacggatttttgatggtactggattgaagtataaaatagatggttctcttggttcatctcaatttgaaaatgctggtgaaggtgaaagtttagaagatttgatcaagaagttttgtagtcacttcgatgtagagttcgatattgaatttaataacaaaaaaggaacatatacatttgtatttacaccattcttaaataaaaatgctagttatcatatagatgatgaaatcaacgccaataatatgaaagttgaagaagatagtagtgaactttatacctatgcagttggatatggcgattatgatgaagaagaaggtagtacagcagctggctttgttatgaaatttgagcatcctagcatcaaagactatggtcgttatgatgcaccaccaattaaagatggtcgtatcaaagatgaagaagtaatgcatcaaaaacttcaatcattaatcgaaagttcagttaaaacatcaatcagtttagacttcatcgctttgaacgaacattataccaacgctgttcctaaagtagctgatatcgttaagattaatcattctattttaggtattaatgagttcgttcgtattgttgatgtaaaaacggtaagagataaagataatattatcgttaaacaagatgtgactttaggtgatttcaaacgtgtagatagatataaaaaacgtgtaagtgaagctgctgcagctgtagggaaattaggtggtcaaaatagctttgttcacacatataaagtaacgactgcaaaaacaaatgcagctattaaaactacacaacgccaacaagaagatagtgctactaaagatataaaagcgactaaagaagatggcacagtcgttaatttaagtagtgctgatattgtcattgatgctaatggcaacttgaaactaaagtaggaggtttgaaatgagaaaaacgatatataccgacttagatgcaatatttggcgctcgttttgttagagaaaatgagctaaattttattgctacaagagatatgttaacgaatatcgaaaagttattagataagcatagtcgaaatgaaacaaaagcacatactgccgaacaaattaagtacacacttcctactggtcctagtaccacagttgataaagaacttcgttatcaaaatgaacgtgttagaaacttagtattaggtaatttagggaacggtcaacaagaagtgcgtgacagtcgtgtgtctatggatggtcaaagtcactcattattatcagaacgtttaaaacacgatttttcatatattgaagaagaaacagataagttgatgaatgttactgatgatcctgcatatttatttaatccaccttacatgaaaagtgctgagcgcggtgtaaatgaaacgccattaagtaatgatccaactgaaaacttaaaagcgttctatgacgtgtttgtcgataataaatattgtttcaaaaagtacattggtaaagaccaatcaaacaaatacaacgtatatagttatacatttgagccggaacattacagtaaaacagtattagtcacttgttgtattcatggtaatgagtatagtgcattttacgctatgagtcgttttatgaacttagttgtaaacgaatgggaaaaatacccacaactcgcttatttacgtaaaaacgtgcgtattgtcatggttcctatcgtaaatccatggggctttgctaatcaagaacgtgaaaatgtaaataatgtcgatttaaatcgtaactttgattactattgggaaaatggtagcggtaaaagtccgagtggtaagaactataaaggctctaaagtatttagtgaacgtgaaagcagaaatatgaaaacactcgttgaaagtttagacgaaatcacagcacacatggactgtcacaacattgtatctcaagttagtgactattgtttattctatccacgttttgctaatcaacctaataacgaaatgacacaacttttaatggaattatcaaactacggtgattatgtcacttggggttcaagtacattagcgtcattttcaaattgggttggtatcacgaaaggcattacatcattcttacctgaagtatatgaaggtcgtgctggtaaacctagaggcgcggaagaaatgtggcgtagcgtatattacttaggaaatattcttttaagattatcaagtctttataacggccaaaatgggaaaacggcaaacgaacccattgttaaatcgtttgtatatagtagtcgttataacaattcaggcgttaaaccattctcacttattgctaaagatggatatcaacgtatgttaatgactcaacaacgttttaaagttactgcaaatggtttcgtagaattaaacggatcaatcacagttcaattatctaaagatacagtatttggcgttaatccgggtgttgcacaaaactacaatccatttagtggtaatggcaaaacaagaagacgtcaattatttaaaattgaacataaattaccggctggcattcatactattccattacacgcagtagcacctgttcaactttctacaacaacacctgacaatgttaaacggacaaatgaagttatggcagtggtagacgtaatgagaaaagaaggatatgcaaaagtattgaatatggtacttaatgttaaattcacacctagtcattctcataatgctgttcaaatgtttacttcaacaggatatggcaaccaaaaagagcaaacattcaaacaaatctatccaaataaaccagcaccatttgatgttcgtaataagattattactaaaaaataaggaggtttttaaatggacggtttgaaaaaagaagcgaaaatcacagttgttgatgagccacgcttgaaacctattactgatgagaatattggtttttacaacatggatatcaatacagcagttttaacgtttcaagtaagaaaacaagattatccattagaaatcagtaaagtgaatactgatatttatgcttactttgtatctgataatggttcatcaactggacgtgttcaagttgattacgttaatccaatgcaaggtatcattcaacttactttagataacaacttcttaaaagctgcaacggacacttatgtgacaggtcaaatctacatcaaagctgttggacgtaaagacacggttgtgttaaacgaattccgtttctatgtgaaagatgcgttaattaatcaaattgatgccgatatcaaaattagttacattcgtgaaattgacgatttaattgataacttcaaagaaaaaatcgaaagtgtttcacaaaattttagcgatatcgaaacagcacaagctgatttcactacgtttgtaaatgcacaaaaaaatgctttcattaaacaagttaatgatatgaaaaatgacatgaatacattcgctaataagacgcaacaagaccttacggaccgattaaattcacttgacgataaagtgctacaaacacttagagaattggaaaatggtacagaaaactttattactgagagtgaattaaatacgctacttgcaaattatccaactaacgaacaactgactacacaattagatagtaaagcaaatgtaggtgacgttaccaacccgcaatcaattgaattacctgatttcgataaaatgattaaagaaaaagtcgatgaagcgcttagtaatgcacaattacaacgtttcacatttactgatgacaacggatatattcctagaattgataaccctgacctctatactatgagtggtattgacgcgtcaggtttttattatgcctacaacccagttaattcacctgatccaaacaaccaaagtggttacttatttgttatggcaagaagtagtagttataaaaaagtgttattcttcccattcaaccgtcataaattttactcacgtaatatgatgggcgaaacaacaggttggggaaattggtatgatgcaacgaataatataaatgtaggagaaatgattgcagatattgatgaaacctaatagaaagaaggtgctaaataattggaagatgttaaagtcaaaattattcagtccgaagaatttaaaaccttcttttatgctggtgatttaaagttactttatgtattgattttgttaatggtcttagacatattaacaggaacagttaaagctattaaagatagaaggttatggtcaagaaaaggactgtttggttatggaagaaagatacttattttcgtcataattgttgtatctaacgtaatagatcagatactagctttaaatggtggactaattatgattacaatcttattttatattgcaaatgaagccttatcagtagttgaaaactgtgcagcaatgggcgtactagtacctaaacaattagctgaaaggttagcagttataaaaaatgaaggaagtcaaccaccttcaattaccactgaaataaaagaagaaatgacaacgaaatataataaagaactcgaagataatgaaacatcagaaataaatatcaagatgaaaaaatagtcggcgtttacacgtcggctttttattatacaaaaaggaaggtggataaatggcaattttaccttcatctggcaaacctacagccaaacaagtagtagcatgggctaaatggttagctgataacaaattaggtgtcgatgtagataaacgtctgggattccaatgttgggatttacctaactatatctttgacagatattggggatttagaacatatggaaacgctgatgcaatggcacgacgtgaccaatacccaaatagcacttggaagatatatgcgaacacacctagttttgtgccgaagccgggtgacgttgtgtgttggacatatggtgcttacggacatacagcgattgtagttggtcctagtgatactaatacatttacgtcaattgatcagaactggtatggggctaaccactggtacgggagtaaagctgcatatgttaaacatagttacagtggtatgggtggtaatctttatttcatcagaccaccttataaggaagaacctaaaactgtaacgccacctaaagatacaacacctagcaaagataaaggtgatacttcttcagacaaaccgacatcagaaactaaaaaagaaccacttaaagagcaaaaagttattacagtaacagctgaagatgatgagaaagtagactatcctagatttataccacatagaattgctaatggtgaagtaagaggtcacaagcctaaagggctagcagtcaagaacgctggaacaatgtgttctgtacaacagatgtattatgacagaaacaaatatatttctaattctgaatatccacatttctacattgaccgtcaccatatttggcaaccacgatatacagatgtcaaagtgcctagtgaacctgattacatcgtaattgaagtatgtggagattacagcgacaccaaaacagatttcttacttaatgaactacatgcaatcatatttggtgttggccaactacaagggtataacattccacttaaacgatcatctttaaaagtatctgacgacttatggcgtaccgttatggaacatggtaactttgatcctttaattgacggaaaaccttcttcaaaggtgcttgataaagtccaagcgtcactacttgagttataccaaaatagaaacaaagtacttaaagaagtaaaaagtggtaaaacgactaaaattgatatcaaagttgataagaaagaaaagtcatcaaattctacttcatcaagtagcacaagtaaaccatcaacttctacgtctacatcaacaacgactaaagtttctagtaagcctaaagttattgttgtttatagtaactacacatttaatcaagcagttaatattcaaatgacaaaatggccacaaatcaactacggttcaggttggtataacgctggtcgcggagatacattgaaagcaatgaacagtttagaaatatggaaaagttcaagtcaaaaatatcaaatgcttaatttaggtaaatatcaaggtatctcagtatctaaattgaattcaattcttaaaggtaaaggaacactatcaggacaaggacaagctgtatctgatggttgtaagaaatataatgtaaatgaaatttacttaatctcacatgcattcttagaaagtggatatggccgttctaactttgctagtggtgtatatggtgcttataactactttggtattggtgcttatgacaataaccctaactacgctatgacttttgctaaaaacgaaggttggactactcctgccaaagctattattggtggtgctaaattcgttagacaaggttacattgataaaggtcaacaaacgttatacagaatgcgttggaacccacaaagtcccggtaatcatcaatatgctactgatgtacgttgggcgcaacatcaatcgaatacaattaaaagtttatatgatgaaatcggtttaaaaggtgaacactttatacgtgaccgatacaaacaaacataggactacatactgacagtatgtggtcctaattttatgtaaaagaggtgttttaatggaaatatttaagcaaggtaaagtaattgctcgtatagatgagcgaggtattgatttaggtaatattaacgttaatctctatacaatggataattctacttcagcgttagatatacacattaagaaacgaaatatcttcagcgaagaaaaagaatttattccagtaaatctaaatcaaacaagttttagaccagtattacatctaatcactgaagataattctatttttacaaatgaagaattagaaatagttaaagcagaagaaggtcatgtacgttacaacgtttctgactacgtaacaagacatgtaggacgtgtacaagcaaaactattcttaattgatgaagatagttctactgatgatagctcgcatgttgcagatttttatttcaaagtgaatgacagtggtttaacaaaagcaatcggtaaagaagttcatgttgatatgctagatgacattgttgaacgaattctgttaaaagatattgaacgtttcagaggtcctaaaggtgatactggtcctaaaggtgaaacaggattacaaggaccacaaggaataaaaggagataaaggtgaacaaggaccacaagggttgcagggagaaaagggtgaaacaggtccaattggacctcaaggagaacgtggtttcgatggacgcgaagggccacaaggaccaacaggagagataggtcctaaaggagataaaggggaacctttcagatatgaagatttcacttccgaacaattagcaagtttaaaaacttctgttgaaatgataaagagtgatttagttgcaattaatggtgctaaaacatacgctttttcagacaattcattaccaaattacacaatactaaaattttcaaatataactattgtaagagtatatggatatttttcaagtttacctgtcagcacagtgtttactcaaattcctaaagaaatcgcacccactcaatcatttgaaagcaagggagtttctagattggctacaaatactaaaacaatcttcaaaattgatgtaaacggcaatatctctacacaagggcagccagatgctggagaaattctcttagatacttggtggataatataacgaaagaaggtttttgaatgtataaacaatactttaaaaagtctaatggtgaagtgtttttatttgatgataaattaaatgaaatttctgatgaatttactgatatcatacctgatgaaggtctttatgcacctattcattttgatggtaaaaaatgggtagggacaccgtatgaagaatggttgaaacaacaacctaaagttgaagttgaagaagtacccaatgagaaagatgttttaatagctgatttaacattacaactaatggaaacacaaaatatagtatcgaatatgcaaaatgacatggctagtttaacattacaagttttggagagtgatattaatgcgtaacataggtattagatactataaaatgggcttatataacgaagaacaattcgctttatttgtaaaacgtggtttcgttacagaagaagaatttaaggaattaactggacaagagtaccaagacataatcaaagaataacactacaagctgacctttttaggtcggctttttatattgaataaggagtgaatgatcgtgtcagacttatatagttcaatgattgaattacaaggtaaagaaaatgattggtcaatcgagatgaatacaaacaaaagcaatattcttagttttgcgccacatggcggtggtattgaagctggttcatctgaactcgcgttactcatttctcaaaagttagattgtaactatttcacatttaaaggaaagctacctactaataacagtaaactacatgtaacttctactcgatatgacaacccagaactacttaacttaatgagaaatattgattactcaatttctgttcatggttacgctgataacgaatatgctcgaacattgattggcggtagcaacgaagaactaaaagaaattattaaatgtcatttaagaagtcgtggctttgacgtacaagacgcaccaaccaacttaggtggcgctaaacctaacaacatcacgaacaagactaaaacaggtttaggtgttcaattagagttatccaccaaacaacgtaaatcattctttagtaataatgatttcagtaaaaaagtaagagaagacagatatcgttggcgtgctgtgatgtatgaatacgcacaagcgattgaatatgcagtaaaagaatatttaaactaagctgacctttttaggtcggcttttttaatacaaaaataggagtgaattagatggaaagtattatcgcatttgcaacagtaatttcagttatcacaatcgcattaacacaattagttaagcaagctggagtgcctaaaaatattgtgcctttaattgctattggtattggtatcgttttaggtggtatcacagcgtttattccagaaattgtaacggaattgtcaatcggtggccgattgcttgcaggtttgattagtggattaatggcgacaggtatttgggaaacagttagaacacgcacaggatcaacaaaagataaaaataataaaattggcggaggtcgtggataatggcagaaaaatggaatggtgtcccagttaaatatgattttttaccgattggaacacgtagaagtgggcaacccataacaagtaaaaaacctttgtttgcagtagcacatgacactggaaaccctcacacaacagcgcaaacaaacgtaaactattatagaaacacatacatggaaaattgggctaccgttgcgagcgctcatatttttgttgatgacaaagagtgtatcgtatgtattccggttacagagaaagcgtggcatgtaatatataacacgcctaccgacaaccaatggtatggcgctgatgctaacgacgtagcatttggtgtagaaggtagttacttcccaggtaacattgaacgttcacgtaaatcattagataatatggcacgtgtattagcttatttatgtaattattgggacattgattataaaaccgaagtaccaggccatcaagacattcaagcagataaaattgatcctggtaacttattagaagcatgtggatattcaagaaacgttaagaatttggataaacaaatcgctaaatacatcaatggcgttaaaccagcaccgagcaagaaactatcaacaaaaacaactaaaaagccgacaccttcgccacaaagtgtggttaagtataaacaagcaatcgaatacatgcacagcttgaaaggacaatatatcgactttgataaagagtgggcttatcaatgtgtagatgtcgttgtagacttcatctatcatgtaacaggcggcgtacgtttcattggtaacgctaaagagttacacattaaaaacgccatgccgaaaggttggaaagtggttaaaaacacaagagattacgtgccacctatttgtgcaattccaatttatacgacaggagtttacgaaaagtggggacatactggtttagtttgggacaacagtggtggtactaaatcatttacaatcttagaacaaaacttcgatagtaaagccaattcgccagctaaattacgtgaagatgactacacaggcttaacacattttattgtgccagacttcgcagacgatagcgttgatttaacggatattaaagaagtacaaaaaacgcaacgtaaatctaaaagttcaatcaagttagaacaaaaaccaccgttaaacttaacatggactaatcaaccatacttcaaagcggttgccgatagtgaaggcgttagaatttgtaaacctaatcataataacgtaatggttgttacgaatgaagaatacgatccgggcgacgtattctatgtatatgaaattcgtgatggttgggctagagtttacagtcctaacaatgacggttatgtatggtatgaacgcttgattgttaaagatatttataaaacagcaggaggtaagaagttcgcgaaaaaagctgataaacaagcagtagcacaacgtaatattcttgcagatacaacaggtttaaaagtgaatagtattccaccgttaaacatgaagaaatcgtctaaagctaaatttagagcgcgtgttgattattatagtgcagcattagttaaatttagaggtaaagaatggtacatcacgaacaatacttataacgcaggatatagtcaattttatgtctttgaaattaaaaatggttggtgtcgtgtttattctagaaataacaatggttggatatggcatgaacgtctaagaattacagaagtgtattaatatgttatagtaaaaaaaccgatttttattttattcaccggggacaagtttcgtgcttgtccctatttttttatgttataataagtacatgaaatggttgttcttgaaacgactcagtcattactggcacagactgcataaagtgcctacatcacattaactgagcattcatatgtcgtcgctgacgagtgacaagcactgtgtcccaaaatggggtaggttattgtgatgtatttacacagagccaaaagctcattcaaaattcccggtaaccatcccggtttatacggaggacttacttgcgtttagcagtgagaagctgaccgtatctttttaagctacctaacatgtcactgggtagctttttatgttatactagagatacccagtttgtgataattaaaataattatcagatttataagagacaacactatattctaaccacgttcttatgagcgtggtctttttttattttaaccgcctcgatttcgatacggttattctaaacccgtcgaattcgactggttttatacataaaaatagtgttacaagaaccacgtaccccctataacccccatataaaaatatacataagagttatgttacaagcaccacgtaccccctataacccccatataaaaatatacataagagttatgttacaagcaccacattagtcgtgccatttatgtttatgtggttaactaaatcaaaaagaaataaagccattggtagagcatcagttgtaccaacattctttggagtaaatgaaccaattttatttggtgcaccactcgtattaaacccagtatttttcataccatttatttttgcaccaatagtaaacgtatggatctttaaattctttgttgatgtacttaaaatgaatagttttagcatcttcttaccatggacgacaccagggcctcttggtattgtgatgggtacaggatttgcattttggtcatttgtgttagcaattgtattaatcgtagttgacgttatgatttattatccatttttaaaagtatatgatgaacaaattcttgaagaagaacgaggcaacaaagaagtaaataatgaattaaaagaaaaagtatccgcaaactttgatacgaaaaaagcagatgcaattttagcaactgctggtgcaaatgaagcgacaacaactgaactagcaccttccgatgaggaagtatcggctaaagagtcaccaaattcaattaacgaacaaactaacgttttagtcttatgtaccggtggcggtacaagtggattacttgcaaatgcgttaaacaaggcagctgaagaatatcagatacctgtaaaagcggcagctggtggttatggtgcacatatggatattatgaaagactatcaattaattattttagcgcctcaagttgcttctaactatgaagatataaaacaagatacagatcgattaggtattaaattagcaaaaactcaaggtgttgaatacattaacttaactcgtgatggcaaagcagcattagacttcgttcaacaacaatttgaaaaataattaggagatgaaagtataatgaaaaaattaccagaagattttatttttggtggtgcaacagcagcttatcaagcagaaggtgcgactcaaacagacggaaaaggtcgtgtagcctgggacacttatctagaagaaaactattggtatacagctgaacctgcaagtgacttttatcataaatatccagttgatttagaattaagtgagaaatttggtgttaatggtattcgtatatctatcgcgtggtcaagaatttttccaacaggttatggagaagttaatcaaaaaggtgtagaattctatcacaatttatttaaagagtgtcataaacgacacgttgaaccgtttgttacattacatcattttgatactccagaaacacttcacagtgatggagatttcttaaaccgtaaaacgattgattattttgtagactatgcaaaattctgctttgaagaatttactgaagtcaactattggactacttttaatgaaattggtcctattggtgatggccagtatttagtcggtaaattcccaccaggtattaagtatgattttgcaaaagtatttcaatctcatcataatatgatggtcgcacatgcgaaagcagttaaactatttaaagacaatggatataatggggaaattggagtcgttcatgcattaccaactaagtatccatatgatccttcaaatccggaagatgtaagagcagcagaacttgaagatattattcataataaatttatcttagatgcaacgtatttagggaaatattctcgtgaaactatggaaggtgtacaacatattctttctgtcaatggcggtaaattagatattaccgatgaagattatgctacattagatgctgcaaaagatttaaatgacttcttaggtatcaattactatatgagtgattggatgagaggatatgaaggagaatcagaaattacacacaatgctactggagataaaggtggctctaaatatcaacttaaaggtgtaggacaacgtgaatttgacatagatgttcctcgtactgattgggattggatgatttatccacaaggtctttatgatcaaattatgcgtgttataaaagattatcctaactatcataaaatttatgttactgaaaatgggcttgggtataaagatgaattcgacgaagaacgtaagacagttgatgatgatgcacgtatcgactatgttaaaaaacatcttgaagtcattgctgatgcgatacgtgatggtgccaatgtaaaaggctatttcttatggtcacttatggatgtgttctcatggtctaatggttatgaaaaacgttatggtctattctacgttgattttgacacacaagaacgtcatccgaaaaaaagtgcatattggtataaagcattagctgaatctaaagaaattaagtaattttataaatttgacaggacagaaatgaaattttctgtcctgtttcttattttattgagagactagtattaaaaaataaggagtataattttttcgtacattctatagagtatttatctttcacgtattttaagaaaaatgatgatcatcatccaccatttctgacactaaaaaagaagtcaatattgttagaacatataatggcgttcttaatttaaatgaaaaggtgaatgaaattcaagttgatcaaaatggcaaaccaaacaaaatgagtgaagatgataaaaagtgacttggattaaaaactatttataaaggtaaacaaatagaagatttaaacatttatgaagataattaaaatggtatgcattttgacgttaaagtatctaatagctcgtctcggccattaaaatctttgttagaagcaagtccaaaaacgtataaaaattcttaatatatagaatcaacgactcaacatagccaacttcatgaaaataaagatgttgcaaatgaaaacattaaagtttatgaaacaaataaaaattaggagcgttcataatactgactctcctaattatctagacaagcatgagctataagttcaattaatttagtacgatgagtatgtccgtatacattaggaagaatcatgatttcatcgacttcaaattcgttttgtaattgtattaactgctgagctacttcatgtggtaagccactaatcattcgacgtttatttttttctattttttctcgatctctttcagaataatggcgttgctgtgctgtttcaatagaaggatatactttaggttgtttaagataattaatacgtattaaccacaaatttaatgcatctactaattgcttaatcgttaattcattttctgccgtaacgacaaaagtagctaaaataatatagggtgaatgcgaatgaccatgatactctgtaaaacgcgatttataatgttgaatgacatgtgttaaatttgcgtgcgattgacccatatgagcaatcacaaaaggtaagcctttttttgcggcaagctcagcactttgttcactcattcctaaaataaacatctcaggtgaatgctctgtgtatggagtggcttctaaagttttgaaacgatgtgaatgaatagtgtcattcgtaaagtatttgttcaaatcatctacttgttgagatagtttgggtttttgagttttaaattcatttagcgcttcgtttacatttttgaagctaggagatcgcccaattcccatatcaattcggccaggatgtttgacttccataattttaaattgttctgcaactttgtaagcactataatgtgggagcataacaccgccacttccaatatgaatagagtgtgtatgttcaagtaacatagccattacgatttcaggagcgcttgatacaacagaaggaacttgatgatgttctgctacccaataacgtgcataaccaagtttctctgatagttgagcaagttcaattgaatgatttaaagcttcttgtggtgtatcaccttcaaagagtggtacatagtctaagatacttaatttcaagtttaagacctcactttgcttggtataataaagtattaagtgttatcatactagacattataaagtgaaagcagttgaattgcgataaaattgtttgtgatatgacactgtttttgaatactgaaaggagtcttttataatgaataatgagcaagttttattagcaaaatatcctaaaggtatgccccaagatgatacatttaaatatgaaaatattgacatagttgatccgaaagaaaatgaaattcaaattgaatctttatatatatctgtcgatccatatatgcgtggaagaatgactcaagccgattcttatgtggagccttttaaaattggcgaacctattcaaagtcacattgtaggcaaaattattaaatcaaattctgaaaaatttaatgaaggtgacattattgtaggtatgttgccatggaagcgtattaatacagtaaatgaagagaaaataagtaaaatatctaatacagatgtaccactttatttatatttaagtacgttaggtatgacaggtcaaacagcttatcatggtttattagagattggtcaaccaaaagaaggcgacactgtagtagtttcagcagcttctggtgcagtaggtgctgtggttggtcaaattgctaaaatcaaaggtgctacagtagtaggtatagctggtggagataaaaaagtgaattatctaacagaagaattgggttttgatgcaggcattgattataaaaaggatgattttgcagaagcattagcaaaagccgtaccgaatggcgtagatgtttattttgaaaatgtaggtggcacaatagccgatgaagttatgaaacatctcaaccgtcatgcacgtattcctgtttgcggtacgatttctaattataataatactgaacaagaaaaaggtccacgtgtacaaagcacattaattaaacatcaagcactgatgcgcggtttcttggtagcggaatttgccgatgactttgaacatgcaagtaaagaactggcaacgtggatacaagaaggaaaaattaaaacaaaagtatctatagaagaaggatttgaatatttaccaaaagcgttcagaaacttatttacaggtgaaaactttggcaaacagatcgttaaagtgtcagagagtgtataatttaaaattcagtaaaaggtaggtatataattatgaaagctataggatttaaacaaccatttaaattagaagaaggaaatgtatttgaaacatttgaattagatatgccccagccatcttctagagagttgcttgttaaaatacaaagtataagtgtaaatccggttgatacaaaacaacgccttactgaagttaaaagttctccgagaattttaggttttgatgcagtagggacggttcaaaaaactggaacagaggttacaatgtttaaggaaggcgatattgtattttattctggtgcgcctaatcaacatggttcaaatcaggaatatcaacttattgatgaacgattagtcgcaaaagcacctaaaaatctttcggcagaacaagctgctagtcttccgttaactggtattacagcgtcagaaactttatttgatgtgttcaaaatttcagaggatccaaatcaaaataaagggaaatcattacttattatcaatggcgcaggtggtgttggaagcattacgactcaaattgctaaggcatatggtctaaaagtcattacaactgcgtcacgtcaagaaacaatcgattggtcaaaaaagatgggtgcagatatcgtactcaatcataaagaagatttaaaatctcaattagaacaacagcacattgaagcggtagatttcgtattttgcacgtttgatacagacatgtattatgaaacaatgatagatatagtgaaaccaagaggacatgttgctacgattgtagcttttaaaggatcacaagatttaaatttattaaaaacaaaaagtatttcctttacacatgaatttatgtttacaagacctatttttcaaacagaagacatgattaaacatcattattatttagaggatattgctaaaaaaattgagaatagtacgtatcaaaatacaacgacaaaagtcatcaatggcttaacaacagaacatttatatgaagcacatcaaatattagaatccaattcaatgataggaaaacttgttataaatgtagaagaatagagaatgatttaacacctcttagtgtctataaataagacattaagaggcgtttttattattttataatatatcaatttgattaattataaaaattccaatatatcgttagatataacatgaatagggtatagtatttctaactatcagaaaggagaataatataatgcgaaaaaaatctataagcattgtattttggattgcattagctatctgtacattatttgtagtgtatggagcgatactacccaagcaattagaagcaatcacgcaaaatattacatcgtttattgcagttaatttttcttggtattatcttttactagttttaattatattttttatttgcgtatacttattattttcaagatatgcatccattacgttaggtgtggaaggagaagagccagaattttcattactttcttggtttgctatgttgttcagtgcaggaatgggaataggattagtgttttggactacagctgagccagttagtcatgcctataaagcgacgcctatacataaaattggtacacaagcagcaattaatgatgcgttccagtttgctttcttccattggggaattcatgcgtgggcagtgtatggcattgttgcattagtttttgcttattttaattttcataaaggatatccaggtttagtaagcgcaacgcttgttccgatttttggagaaaaaagaatgagaggaccaatcggaagtgctatagatgttttagctgttattgcaacggttacaggtgtagcagctaccttaggttttggtgctttacaaattaatgaaggtcttcactacttgtttaaagtaccgagtcatttcggcacacaagtcattattattattattgcaactattttatttagttggtctgcatggtccggaattgataagggaataaaaactttaagtaatattaatatgattttagcttttattgtattaataggattatttctagtaggacctactttatatattttaaatacatttactaacggattaggaaattatatttttaatttctttagtatgagtttgcgtattccaatggatggtggcgcaaaatttcaatgggtacaaaattggactatattttactgggcatggtgggtgtcttgggcaccatttgtaggaatattcattgcacgtgtatcacgtggtagaacaattaaagaatttattttaggagtgttatttgttccagctcttgtatctttctttttctttgcagtgttcggaggagcagcagtgtatcttcagcatagtggaattgctaatattgctaaagaagcaacagagactgcaacatttgccactttagagcattttccattgggatttgtattaagtattgttagtttaatcgttattatgattttctttgtaacttctgcagattcggctacttatgttcttggaatgttaagtagtaaaggaaatattaatcctagctctttcgttaaagtaagttgggggattattatggccttatttgcgatgataatgatttataccggaggaacacaagcaattcagaacttattaattattgcagcactcccattttccgtagttattattcttatgatatggtctttatttaaaacgttgagtttagatcatccgcgggtatcaaagaaaaatgttttaatgaaaaaagataatttacaatacaataaaacgaataatataaaaaacgaaaataattatgaaaaataggtttttattgtgttaaatttgggaatatttaatctagaaggtaaactttaataaatttaaaaaaattaaataaaaaattttaatgttaacgttttaaaaaatttttaaagggtacttaaattttataattaaataatttcaacaatgactaaggaggtgtgtttagaggtgcatagatttaaaaactttatccttggcctattaatagttgcgattgttggtttcttattgtttatgtacatagatgatagtcgtattaagcgttatcaagactatttcttacaattcaattggttccaaccattattaattggtttatctgctttactcgtattaattggtattatattggtatttagcatctttaaaccaacatatagaaaaccaggtctttataaagactataatgatggacatatttatgtatcacgtaaagcagtcgaaaagtctgcatacgatacattaactaaatacgatgaaatcagacaaccaaacgtggttactaaactttacaataagaaaagcaattcttacattgacattaaagctgatttcttagtgcctaatgatgtgcaagtaaaatcattaactgagagcattagatctgacattaaacataatgttgagcattttactgaaatgcctgttagaaaattagaaattaatgttagagatcaaaaatctgccggacaacgcgtactataagggagggataacatggctgataataatcaaaatagtcaagattctactcaacaaattatcgacttcctaaagtcgtataaatggcgaattataggtttctttgcattcttaattattgcaatcttattcctgactttagggttctggaaaacaattttaattattgttttatgtttaatcggaattggcgttgggtatatgaaagaccgtacacaagatttcatgaacttcttaaatcgatggagttaacattcattatttaagaattcatataaattaaaaaattaagtattaaaaattaaattttatttaaaaaggagaattcacatggctgtagataataacaaagctaaacaagcatataataaccaaactggagtaaatgaaaaagaaagagaagaacgtcaagaacaagcacaacaatacagagaagaacgtcaaaataatcaacaacattttgaaaataaattaacgttctctgatgaagttatcgaaaaaattgctggtatcgctgctcgtgaagtaagaggtatcttagatatgaaaggcggattcactgacagtatttctagcgcattctcaagcggtaacaacgtaacacaaggtgtttctgttgaagttggtgaaaaacaagcggctgtagacttaaaagtcatcttagaatacggtgaatcagctccaaaaatcttccgtaaagtaactgacttagttaaagaacaagttaaatacattactggtttagatgttgttgaagttaacatgcaagttgatgacgtaatgactaaaaaagaatgggcacaaaaaaaccaaaaaaataacaacaacaataacaataataacaacaataataatttcgaaagatcagatttacaataagtttattgaaaaaagaccttggaatgttccaaggtcttttttatagttaatatcattttttaacaagagacggaataacattcaattttaatgttattccgcttcttaattttaatgtagtggattattaactttaatataagtgtaatgatgtgcttcatcttctaaacgcatagtggttacacacttataatcaattgttgcagcaaataaagtatgagtaatcttttgtatacgtcctgtatcaacgtcagtcaacttagctaatatatcttgaataatatgactgatatgatgccacattattttttcaaaatccatattttctactttttcagtaattgttaatattaattcagctagatgattttgaacagttgaatagaatactttattaaaaacagatgtagtggattgagtaagaattctagatttcttatggaaatgtgatgttttataccccattttgtttaattgagtttcatcaatacgtaatccttcgaaatctcgaatatagattttacttaaactaccgtcttgattaaatgtagcaatagaattttgtaaatgtgcctctagcgcgattccatattttacatatagtggcataactattcctaataattgagtcgcataatcttgaatccatgcataagccgctttttcaaatgacttaaattgacgtgtaagttgatatcgttttattaagctttcaattggcggttcagtattgtttggataataagcaaccagactagaaggtatgacaggtattgtatcttcttcgattaatgtataaatattttctctaaataatgttcccagttgttcactacgttcagtttggattgttgaatgatctttagaattataaaaatgaatgccagcaatttcatctaatgtttctatgcgataaggttgaaaatcagggtcgttttttaaaatatcattcacaattttagtaactaaaggtccattatgcgttgtttgttcagaaagcgtccgtatttctccagtaatatgaacatttgtagaaagtttaatatgcgggaatagtttaggatattttggcattaatgttctgaatgataagccagcataataaggtaaggtcatatcaataggaataataagttgttcatctagttcttgttgatattgactaagtaaaatatgttcgaattgccaaggatggaccaccattaaatgataatcttcaattcttatattattatagttatttaaaaggtgagtaaataatttatgaaaagattggtgaagtgtatcattataggttgaagataaagattgaacatttgctatactattatgtatgaatacacattttaattggatttcttgaccgtattctgaactataatgaatattctctttagcactcatccctttacgaagctttgcgcctggatgaaggggatgaccttctataactgattgttccgaacgtaaataactatcgtcactttttgcaatcaattcccataaggattcgtagtttgaatgcatatgtttagcttgataacttagtgccagaatcatattagcagcactattatttaagtcttttctaaattgttcactagcagcgttatcaagctttggcgcttcagctaaaattaaatctagaatatcatttggatgttggattctttcatattcgtgattacgatgttttaagatataaaaggggccttccacatctacccggtcgaaggcatatctaccttttatttgactgtaaatatcgatatttgattttggaaaatgaatacataatacgtctttatctttagaaaacatagagacggttaatttggtaggtctaataatctgactattatctttagcgtgtattaagttttcacgatataaagatgtaataagacgttgagaaattttatctctacctattaaaatatattgtttaaaatgatcgattaaatcaggataaaattcatttaaatatgtataaacatcatattcttcattagtaagttgtaagttatgattattaatggttgtattttgattcatataacacctcatccacattctacaaaattataaatagtttgtataatatctaactctaaaattaaacctttttaaaagatagtttaaatttaagacacaatattttaataaattctaagttcatgtcattgctagtacccttaattaaatttataattattaaactagttaaacttaattatgaaaacgaatgataaggcggaggatttaaaaatgttaaacgagtggaagcatgcagatagaaatatgcaatatagagtgttaaatgctctaataaaggaaaatatatggactcattcaactaccatttttaaagaaaatcattatataacgattgagttcgaacaagtgcttctaaacgttcattataaatacgaaagtgcattatctcgatatgaatttgatgggccgataatatatatgaatcatcaacataaagaatcagtggatagtctagaaaaactattagacatactagtaacagactttcatattgatataccattccatttaaaaagtgaacttattcatagcagagatagtttcattgaagtatataaagcattcgatacacgtcatgagtatcttcaaagacatgataaatatataaatgcctcagaacgtttaaatttttttacttggctagaaaagttgaaaaaagataatgatatagatgacgtactatattctgaaagcttaatatttgaaggtcatcctacacatccacttactaaaacaaaattacctttatcaatgaaagaagtgagaacctattcgccagaatttgaaaagattattaatttgaaagtgatgctaatacataatgagtatgtaaatgttacaaccatttttgatcattctcagtttattttaaatgaggttattcctgaatatattgacgaattacatacattcatgaatgatagagaacgtttgcttaaagactataaagtcattttagttcacccatggcaatatgaacatactattcgtaataaatataaggagtggctacaagattatattttgatatctactccatttcaggttccatctaaagcaacatcttcttttagaacaatgtcgctaatcaatcatccttatcatgtgaaattaccagtcaatgttcaagctactagtgcagttagaacagtgtccccagaaacaacaattgatggacccaaattaagtcaagcattacatcgtgaattaaatcagtatacacaattagatgttgcacttgagccctatggtttatttgctaaaacagacagtgacgatgctagacaacttgcttgtattattcgtgaaaaaccttttacaaaagatgatggtattttattagttacaggtgcattagtaaataaaaatgtagtagataatgaaattacagtagatagttaccttaaatggattaatgatgatataaatcaacgtaccatacatcagtttatgcgaaattatactcgtcagctggtaacacctttattagctttaatacaagattatggtatagctttagaagcacatatgcaaaatacattagtgcatttaggaccaaagtatcaaatacaatttatagtccgagatctcgggggctctcgaatagatattaaaaccctaagtcaaaaattaaagcatattgaagtggaaaataaaagtttacttgcagactcaattgaagaagttattatgaaatttcaacacgcagtcgttcaaaatcaactggcagaattaatttttcattttaaaaagtatgactttataaaagaagaagaactttttaatataattcaagaagaaatagaagtagcaattaatgatactaagcctcatgcagatacattaagaaaagttttatttggacctacaattacagtaaaagcattgttgaaaatgagaatgaaaaagaaagtgaaaaaatatctgaatattagtttagataatccaataaaaagagaggtgaattaagtgtctcgtattgtaatcaatttatcaaagattgaatataatgcacatgtattaaaaatgttgtttgacagcaaaaatatagccattatacctgtgataaaaagtattgctggagatgaacatatcattaaacgattaatgaaagtaggatttaactactttgcagaatctcgactagaaaatatacctcagcaatttacaaaagattgtcaatttttacttttgagatctcctttaaagcgtcagtatgaagatttaattaaaaagagttacataagtattcaaacagaaatggtaacaatacgacagttaaatcatattgcaactgaaatgagtcatgaacatcaagttatattgatggttgattggaaagatcaacgtgaaggtgtattaccttgtcatatagttgaatatattaatgaaataaaacgaatgaataatataaaacttttaggtcttgcatttaatttcatgtgttttaaatctaaagccccaacattaaatgatatcgacaaaataaatcaatttgttcaccatgtacaatacaagacaggggtatcatttgaagttatttctggaggtaactcaagtatgcttccattgttaaaacaatatgatttaggatgtattaatgagttgagaataggagaaacattatttcgtggtgtggataccactactaatgaaaatatacctgaattatttcaaaatgcaatattacttgaagcggaaattattgaaattaaacctaggtatacaaagacgaaagaaagttacttacaagctattgtagatgtgggatatattgatactgtgattgaaaaaataaaaccactcaatcatcgaatagaaattatgggtgcttcaagtgatcatttaatgatagatttaaaagaagaaattaactataaagtaggagattgcataccattttcattagaatacgaagcgctatcacaactaatgtatcatcagagaatggaaaaatattatagtgaagaacaagctatttctcaacgtattaacaatttgaagcaatcaaaatatatcaacaatagataacttattatatagaatctgagacatcaatagtgtctcagatttttttatgcgttagctgtcaacgttttcgggatgagacaacgaattcaaaatgaattctgtgtcaattcctattttttattttttattgacaatgataatcgttatcactaaaataagaatatacatcaatacatattaaggagtgtcatcatgaaaagaacaacaatttttggaatcatttcaatattattgactttaatattaataactgcatgtggaaaggtaagtaacaatggttcaaaatcatctaatcacacatcatcttctaaagatactattgaaattaagcatgatttaggtacaactaaggtatcaaaaggtgctaagagaatagtagctttagaattctcatttgttgatgcattagcagctttgaatgttaagcctgtaggaatagcagatgataataaaaagaatagaatgattaaaccgttaagagataaaattggaaattatacatctgttggtacgcgtaaacaaccaaatttagaagaaataagtaaattaaaacctgatttaattattgccgacagtaatcgacataaaggaatttataaggaattaagtaaaattgctccaacaatagaattaaaaagctttgacggcgactataatgaaaatatcgaagcgtttaaagttatagctaaatctctcaataaagagaaacaaggtgacaaacgtttagacgaacataagaaaaaaatagttcaatataaacaagagattcaatttgataaaaatgaaaaggtacttccagctgtagcttctaagtctggattactagcgcatccaagcgaatcttatgtgggacagttattaggtgaattaggttttaaagaagccttaaataaagatgtgacgaaaggattaagtaaatatttacaaggaccttatttacaactcaattcagaaacattatctgaaatcaatccagaacgcatgtttattatgacaaatggtgcaagttctaatgaatcttcttatcaagaattgaaaaaagatcctatttggaacaaacttgatgcagttaaaaatcataaaatagatgtggttgatcgtgatacatgggcccgcgcacgtggtttaatctcttcagaagaaatggctaaagaaatcgtagaaatttcaaaaaaagacagaaataaatagggtggattaacaatggctatacaaaaaagtaatcgtctttctactaataaaaggtcaatcaagaagcgtatgacactcaccttttcagtgagtgtttgccttctttttatttttgcttatcttaatttagccactggaactttaaatattcaaactaaagatatgtatcattacttttttacttcaattgaaaacaagcagacgtttatcattcaaaatgttagaatgccaaggatgattgttggcatacttgtgggaggagctttagctctagctggtttactcatgcaatctataactagaaatccattagcatctccgcaaatatttggggtaaatgcgggtgcttcatttattatcgtattagtgacagtattaatgcctacgatgggaaactatgcaacctatttagcgtttattggggcatttattggtgggttaactgtgtatttattatctggttctacgaaaaaaataacaccattgaaattagctttagcaggaatggcagtacatttgttttttagtagtcttacacaaggtattattttacttaatgaagattctaattctactgttatgttttggttagttggctctttaaatggaatgaaatggaaagatgtaatgataatttgtccttggattcttatgggacttatcatactaattggatttgcaagacaacttacaataatggaattaggtgatacactagccaaaagtttaggtcaaaaaactgaagtgataagaatcattatcggattacttgttattatatttgctgggacatctgtttctattgtaggacctattggatttataggattaatcgtgccacatatagtaaaacgttatgcaccgcataattacttcattttaattccgttaacatttatagttggcgcaaatttattgttattatctgatacattgagtcgtttaattacatatccctatgaatcaccagttggaattgttacttcatttataggagcattttatttcttatttattactttaaggagagtgaaacgaatatgacacaccactcattagctattcgttatgcacttgtcgttactatattaatcataagtatatttattagcttatgcgtcggcgcaacaatgtatcatcccattaaagtaataaatagtttattgatacaagatgattttattctaaatgaatatcgtatacctagaacacttttaggattaatagtaggaagtagtttagctatttcaggaacaatcatacaaggggtagtaaaaaatcctctcgcttctccagatgttattggaatgactaaaggtgcgagtttagcagcgattattattattatggtttttcctaatgctcctttaatcattttacctataggttcatttgttggtgcactaataatcagtttaattttatcttttttaatatctcaatttaatattaaagggtctaccttggcattaattggcttagcaattggtgctatatgtacagcaattgtacaatttttactaatacgaaatcccatggatgcaaataatgcgcttatatggttaacaggtagtctctatggtcatacgatagaaaatgtatattcaattttaccttggtttattattacgattccaatcgtcattgctttaagtcatcaactcgatatcttaaacctaggagattcaatagcgatagcattaggtacacgaataaaacgtattaaaatgatactgttgattttatcagtgatgttagcaggatcatctatttcaatagttggaggaatcagttttcttggattaattgcgccacacatagctcgaaaaatcgtcggatatcgtcatgttcacgtcataatgatgtctggtttaattggagcaatcctcattttatttagtgatggattagcaagaggtattcatccgccacttgatataccagtaggcatagttattgccattgttggtgttccatactttttattgttacttagaagaatttaaatattaaaaagaatgagatagtattcacagtgaatgctatctcacatttttttgtgaaattttaaacttttgtatattgcaagttatttgaaaataagatatagtaaaatacatattgtttataaaaatacatataaagttatatttatataattaatgggcgttaatttcgatgaaaatacaaaataaatgaataaatacaattacctatacaaatagaaagaagggtgaatattggagaattataacaaacaggagaaaataaaaggaagaataaaatttatatcgatgtcaatcattggtattattttatttttaatacccgttccaattgtacaagatggggagaaacaaacaacattaccagtggcatttttggcaaattggttaaaagatttattaggtcctgcaatgtcaattctcattattacaatcattacgttatcgactattttgactattttattttcaacaattttaaagaataaagtaaaaccaggtggtcttatcgcgaatgcatttcaagttggcccagtgtggatgatattaagagtacttgcagttgtatttgtctggatgacttattttaaaattggaagtaaagtgatctattcagaagatacgggcggattagtatttaatgatttattacctacattagtagcagtattcctttttgctgccttatttttacctttattaatggaatacggtttattagaatttttaggaccattgtttagaccaatcatgagaccattatttactttaccaggacgatcagcagttgataatttagcctcatttataggagatggaacagtaggcgtgcttattacaagtcgtcaatatgaaaaaggtatttattcaaaaagagaatcaatagtaatttctacaacttttagtgttgtatcaatcacgtttgctattgttattgctcaaactattggattacaacaaaagttttttgtattttatttaacagtgatcgtttcttgcttagttgcagcgataatcatgccaagaatatggccactaaatcaaattcccgatgattttacgaaagaagtatctgaaagtacacgacttgaaaaacttccagaaggaaaaactgcattagctcatggttttgatgaagctacaattgtagggctaaaagcaccaggagttaaagaattttttaaaacgggaattaaaacggtaattgatatgtggtttgttattttaccagtagtgatgagtatagggactattgccacgataatagcaaattatacaccagtatttgaaatcataggaaaaccatttattcctatattacaattacttcaaattcctgaagctgcaaaagcgtctgaaactttacttattggttttgcagatatgtttttaccttctatcttaatagcgacggtacacagtgaattgacacgatttgtgattggtgctttaagtatatctcaattaatttatctatctgaagtgggcggtgtgattttaggttctaaaatcccggtcagtctcggaaaattatttatgatatttttaatcagaactgcaatcacattaccaattattgctttaatggcacatttattactataaaaaaagaagcagagtaaggattgatgaatgcaattccaattccttcctgcttcttttttctattctaaagttgatagtacgtttgcttttacaatttcacttgttactactggtgaatcttctgttgaagattttccagtatttttatgcgcttctttaaacgcatcactttgggtccaagctttgaagttttcttcactgtcccaccatgtattaacatacatattttcagtatcattagtattatcaatttgccaaacttcaatttttctgaaaccttctagttgttcaatcttaccacctttagtgaaacgtggtgccattttttcagcaaatcctttttttacagtaatacgatttgtaacaacaaacatagtcagacctccttacttatttattttaataatatacaaattcaaagatatatcaaataaaatacttgtaataaataagaaaaataaacgtttaaagaaagatatctatataccgaaaatatgttcgtattttaaggctatttatgttaatatatttttaataaaggagaagataaatgacaggaaaaacgcatgtagctgctggtttgcttgtaggagcaataacagttgaccattatcatacagatctattttctactgtaacagtaatttgtttagcaatatcaggaagtttacttccagatatttgtcatacaagaagtaagattggaagacaatttaaaattcttagtttgctcgttagtactatcttcggacatcgaacatttacgcattcattgttatttttaggtatgataggttttttacttattttaattcaaactccgacttattatttagttactattatcggtgcaatggcttctcatgttatactagatatgttgacacctagaggggtaaagttactttatccaatacctttatcgattaagtttccttttactttcaaaactggtggttttttagatgcatctttatcaacagcttttagtattggagcaatatacataatatttcaagagtttataaatgaaatcttgaaatatgtgagccattcattgtccggatgatatcaatgaatatgatagatcatctttcttgtcttaatatcaaatttataattaatatgataaatatatttgaatgacacgaactatctataaggagagttagtaatgctagatcaaagtaaattagaaaaatacaatcaagaacatttaattgaatatgagaaaatgatgagtagtaatgaaaaagaacaattagatgaaaaagtgaactcattagatttagaatttattcaagaactttatcaaagtttatatgttaatcgtaaaacaattacagatgttactgcagtttctgaagttgattataaaattaaggaagcattcacggagcaagatcgtgaatattatgaacataaaggaatagaagcaataagaaatggagaatttgctgttgttcttatggctggtggtcagggcacacgtttaggttataagggacctaaaggttcttttgaaattgaaggtataagcttatttgaacttcaagcaagacaactattgcatctaaaaaatgaaacaggacattgtattaattggtatattatgactagtgatattaatcatgaggaaacattacgttattttgaaaaccatgattattttggttataacccagaacgtattcacttttttaaacaagacaacattgtggctctaagtgaaaatggtagacttatttttaatgaaaaaggctatattatggaaacacctaatggtaatggcgggatatttaaatcgctagagcattatggttatttagataaaatggagaaagatggcgtaaagttcattttcttaaataatattgataatgtgttagtaaaggttcttgatcctgtatttgtagggtttacagtagtaaatgataaagatatcacatctaaatctattcaacctaaaaagggtgaaagtgtcggacgattagttagtaaagataataaagatactgtacttgaatactcagaacttgatgaaaatgtagcgaatacatttgataatgcaaatattggcattcacgcatttaagttatcgtttataaatcaagtggtaaataatgatttaccatatcatttagccattaaaaaattgaaacaactggatgacgactttggtttaattgaaaaaacatctttaaaatttgaactattttattttgatattttccgatatgcgaatagctttattacattacaagttccaagaaaagaagaattttcacctttgaaaaataaagagggaaaagacagtgtagaaactgcaactgatgatttaaaacgaatgaatgtaatttaaaggagggtggaatacgatgtctaaatcatctcagcatacaaaagataatgtaattgaatcatttaaagacatcattccactatcttttggcgaggaaattggtaatgcaacttcacatggtgttgctgcactaatgactttatttttactgccttatgtagcagtacatagttataatgagtatggaacactaagttctattagtgtttctatctttgttattagtattttcatgatgtttatttcttctactgtatatcattcaatgaaaaataatacatcgcataagtatatattaagaattattgaccatagtatgatatatgtagcaatttctggaacgtatacacctgtcttactaacagttgttggaggttggttaggatggctggtctttttgttattatggggaacaacaatatggggtattctatataagtcaatttcaactcatgtaaatcccaaattaagcttaatcgtatacttagttatgggatgggttggcattatatttttacctgtgattattattagaacatcttggttatttattttatttatcgtattaggtggtctttcttataccattggagcatggttttatgcacaaaaaaaccgtccatattttcatatgatatggcatatttttattgttatcgcatcactctttcattttataggaatcgtatattttatgtagacctagctgaaaggtcatatcattgagaataacttagtttattaagtgcttatttagaaacaggactatgaattcaaaaagaattctaccctgttttttctttttttaataatacattaaagttgtttacgaatataattaagaatattctatattatgaactttttaaatacataggagggcaaagatgaaattaaaatcaataggtattgtagtgactttggttttaacaatgtttatggcagcaattgaaagttcaattatttcactagcattgcctaccattcgtaaagatttgaatgctggtacagcagtgccattagtctttaccgtttattttatagcacttgttgtagcaaatcctattgtgggtgaacttctcacaagatttaagattctatatatagctgtagtcggcatactattatttggtattggaagttttatgtcaggtatgagtgaaacgtttacaatgttaattatttcaagagtcatacagggacttggcgcaggagttatgatgtctttgactcaaattgtaccaaaactagcatttgaaattccgcttcgttacaaaataatgggcatcgttggaagtgtctggggaatttcaagtattcttggaccgttattaggtggtggaatattagaagttgcaacatggcattggttgttttatatcaacatacccatagcattgatagctattgttttagcttttcttacttttcattttccagaagaagcggaagtacaacacatacactttgatgcaaaaggattatctttgttttatatatttatcggacttcttatgtttagtttattaaataaaacaggtgttacttttaatattattgcatttatactagcaatagttatattattcgttttattcaaatatgaaaataaaaaaaatatgccttttttaccaataagtgaatttaataaatcaatttcactggtatttataactgatttacttatagcaatatgtctaatggggtataacttatatatacctgtttatttacaagattatttaaaattatctccaatacaaagtggattagttatatttccactttctgttgcatggttagctttaaacttcaatttagctaaggtagaatcaaaattttcaagaaaaaaattatatatcggaactttcatatcattaattttaagtaatatgattttagtatttggacttcatattcctcttattattgcgggagctgtgattcttgcaggattgagttttgctttcgtttatactaaagacagtgtaattgtgcaagaagaaacaagtcctaaatatatgaaaaaaatgatgtcattctatgcattaactaaaaatttaggatcatctataggatctacattgatggggtcattatatgcacttcaatttggtttattaggaggtaacttttataatatattaactgtaatcacaattgttgcgcttatattaattttaatgtgggtatttttatttaaagagaataaagaaagtataaaataataattttaagttactatatataaatgataaagtatcattataaagtattattgatgaaaagaggaggaaagagaggaatgaaattttctaatcaaaaatttaacggtatctttccggctcttcttattcttattatttttattctatcaggttgtatatttttaatatttttaggatttgggttatttggattaagtcgaattcttatttttttaaaattaggattttttacatacaatagggatttattcagcaatttagtatattacggtagctatatagtatttggatactttttgctatttgctattgagcatttaatggattactttagaaaacaattacctaataatccatattttaatggaacactatttcatttaatttcatatgtaattacgactatcctattctattttgttattcatattcattacgtatatattaaaattgaattttgggttattgcattaattattggaatactatatttatgtaaaatgattttttatccagatagcgaagacttgaatgataagaagtagatataagttataaattcttgataaattcagcacagattgtaagtaaatttgttaaaatatgaatataaagaaacttaagggggataatgagttgttaacggtagaacaagtggaaaaaatagtgggaaacttaaaagatccaattattaatgtgcctttaaaagaaacaaagggaattgtagaagtaaaaataaaagaagaaattcaacatgtaagtgttaaagttgctatggctcaattaggtggacaaccacagcttgatttgcaaatgtcagtggttaaagctttaaaagaaaatggtgcaaatacagtgggcattcgttttgaggaactacctgctgaagttgtggaaaaatacacaggaaaagaaaaagaaaaacctaagacaattgaggggttattgtcacagaataatccagtggagtttattgcaattgcttctggtaaagggggagtaggaaaatcaactatagccgtaaacttagcagtagcattagcaagagaaggtaaaagagtaggactcatagatgctgacatttatggttttagtgttccagatatgatgggtatagatgaaaagcctggtgttcaaggaaaagagattattcctgtagaacgtcatggtgttaaagtgatttcaatggcatttttcgttgaagaaaatgcaccagttatttggcgtggtcctatgttaggaaaaatgttgacgaatttctttgttgaagttaaatggggagagttagattacttattacttgatttacctcctggaacaggggatgtagctcttgacgttcattcaatgttaccaagtagtaaagaaataatagtaaccacaccacatccaacagcagcatttgtagcagcaagagctggagctatggctaagcatacagagcattctattttaggtgttattgaaaatatgagttatttcgaaagtaaagaaactggaaaaaaagagtatgtatttggtaaaggtggaggacgtaaacttgcggacgagctaaatacccaattgttaggagaactacctcttgaacaaccttcttggaatcctaatgacttttcaccatctatttatcaagaagaagatcgattaggaaaaatctataaaacaattgcgcaaaaagtaattgctgcaacaataaaataataaataaaaattggtgtaaaagtgctcgaaaaaaatatcatttcgagcgctttttctattgcaaaatataaaaattctgatagaatatttttttgtgagcaagttaaaagaattgcttaaaacaaaaataaaattattaaaataatttgttgacactaaatgaattgtttgataagatataaaagtcgttttcaagaaatgttaatacattttaaaaaatgtaaattcggtgtaaaatttaccattgcgaaatcttggaaaacgatataaaatattaaaagtaatcaaaattagttattgactttcgaaattgaaattgatataatttgatagattacattttaaatgaacattgaaaactgaatgacaatatgtcaacgttaattccaataaagtaacttaaatgttacaaacactatttagtattatgagctaatcaaacatcataaatttttatggagagtttgatcctggctcaggatgaacgctggcggcgtgcctaatacatgcaagtcgagcgaacagacgaggagcttgctcctttgatgttagcggcggacgggtgagtaacacgtgggtaacctacctataagactgggataacttcgggaaaccggagctaataccggataatatttcgaaccgcatggttcgatcgaaccatgcggttcgaaatattatccggtattagctccggtttcccgaagttatcccagtcttataggtaggttacccacgtgttactcacccgtccgccgctaacgtcaaaggagcaagctccttatctgttcgctcgacttgcatgtattaggcacgccgccagcgttcatcctgagccaggatcaaactctccataaaaatttatgatgtttgattagctcatcatactaaatagtgtttgtaacatttaagttactttattggaattaacgttgacatattgtcattcagttttcaatgttcattttcttcaacacaagaattaattatactcgctatcgatatgaaagtcaacaacttttttaattaatttttttgtgtttttaatgttcgttgatttgtttcgctcaacaaatacatactatacagggtttctttcaaatgtacaatggtaaaaattacactacaaagggtaagagatagactctaatccacaaaatacgaatattatataaaataatttgttaatagttaatattaagtatgttttgtttcagtttacagctttttttacattgctcttctcctataaaacaaacttttaaaaatttacatttttttaaaataattttaaaaaaagctatttacagtgtgatttagtattgttgaaggtaaaatatcctcgttattcaatactaatctactataaatagcacataaaaatttacatttcggttctaccagcaattgctttagaaagcgttacttcatcagcatactctaaatcgccaccaactgataacccttgtgcaaggcgtgttacctttattccaataggttttacaagtcttgaaatatacatggcggtcgattcaccttctaagtttggattcatagctaatataagttctttaacttcttcatcttttaatctatcaataagtgtaggtatattgatatcttcaggtcctataccatccattggagagatagatccatgtaatacatgataaaggcctttatactctctcattttttccattgcaataacatctttatcatcttcaaccacacaaataattgaacgatccctttgtttatcttcacaaatataacacggatctttttcagtaatatgaccgcaaatactacaataggtaagttctcgcttaacatctactaaggctttagcaaattttacgacatcgtcttctttcatgtctaatgtataaaaagccagacgttgagccgtcttgggaccaatgcctggcagtttcataaaactatctataagttttgaaatcggttcaggataatgcatacttaacctacattcctggaatatttaagccttgagtatgtttacctaatcgttcttgtgttaaattatctgctttattcattgcttcatttgttgcagctaaaactaaatcttgtaacatttcgatatcatctggatctactgcttcttctttaatttctacatctacaacttctttatgaccagttacagttacagcaaccataccgccaccagctgttcctacaatacgttcgtctttaagtttttcttgttcttgtgccattttcttttgcattttttgcatttgtttcatcatttgttgcatatttccgccaccgcgcataattcatttcctccttaaattttcacattaattttattataatttatattttattatacatacgtttatatttattgtcatgtatgactcattcaacttactttgtaaacaaactgacctattttattattcatctataatattcacagtatcttcaccaaataaatctttcgctttttgagcgatatcagacatttcctctttagtattatcttttgtactttcagaagaatgatgatcattttgttttctatgattaatatactcgcttcttactctcatccattgatctgaagggacacctactacttcaacatttttatctatgatattacaaacgacgttttcaatgtttttccttttttcttcatctttattaacaatttcacaatgtatttcttcatcaaattgaattaatacacgttttctacttgctgctactggaattgagttttgcaataagctgactaaagattttttatcattacttttagcataatcaatgacttcttgccaatgttctttgagtagttgaatatcttctttatttgcttcatctaacactttagctatctgagtcatagaaaatgctgctttactttgacgtttacttctagaatgtgtgtttgtttgtgtgtgcttattattactctgtgaaataccttgtgcttttagagtttttaactcattttcaagttgttccattctttgtaataacacttcattattaggttctgtagcaacaggagttgttgctacattttctactttcgtaggatttgtttttaccatttcagctaatttaactaataagacttcaaagtgtacattctgattcacactaaatctaatagaaacgagcgtatcatttataatatctatcatataatataacgtttctaaatcaaattgagttaaggcatcgtaacttgtttgttcattgatggttttattcataattgtatctcttacgaaataaatcatatcattaataagtctatttacttctttaccttcagatacaaagtgatgataacgagaaaatgcttcttttacatttccattaacgatatcgttaaacaattcattaagcgacgcttcatctacactacccgttacgtctaatacatcttgtaatgtaagatgctcatcaccaaaagcaattgcttggtccataatgcttaatgcatcacgcataccaccttctgatgctttagcaataaattctaatgccgcttcctcataatctagtgattgttcttgtgcaacaaaacgtaatcgttccacaatctgttccgtactaatcgctttaaaatcaaaacgttgtgcacgtgaaataatcgtaggtggtattttatgcggttctgttgttgctaaaataaaaatagcgtgtgctgggggttcttctaatgtttttaataaagcattaaaagcacctgttgtaagcatatgaacttcatctataatataaactttatattttgattcactaggtgcgtatttaactttatctctaatatttctaatttcatcaacaccgttattacttgcagcatcaatttcaataacgtcaccatttgttccttgtgtaatgcctttacatattgcacactcattacaaggttcaccatcatggggatttaaacagttaatagctttagcaaacactttagctatacttgttttaccagttcctcttggcccactaaaaatatatgcatgagattgctttccttttgaaatagcatttctcaaagttttagtgacatgttcttgacctacaacatcactaaaactttgaggtctaaacattcgatataaagcttgatagttcacagtcgcacctccaatacaattacttatcaattatatcatgccatatctttgatatattaattttttatacttctatgatatcggttctagtttcccatgtggatattcacttaattgatcccacaagaatttcacataaagaggcttatcatcatttttcgatataatatgatgttgcgccgctgatgcataacctaacgttgtaaaataatcaggacaaccatctacaataatagcagtataatgatgagctttcgcacgctcttctacagcttgtactaaagcttttcctataccttggtttcgataaggtgttgctacaatcaaagaaaataattgtaatactttaaatgtatcttcattatcaatgagattcacttcatttagcatgatgtgccctataatgtccccatcttcttttttggcaataacttctaattcataattatatgtaggttgttttcttaaattagaaattattttactatgtgatttaccatctaaaccttcgttattagtataatgttgttcaagtttttctaaagtctcgatataatccatttcagttaaagtacttaaataaacttgcataacttccccctatattaacatgttcctaatcatatttctgttaaatgaagtaaagtgaatgtatcagtgtatacacccatgaccctcattataaaaataatttagggcatttttttctcaaaatgcttattttgaatatctgtatataagtatgatgtttatagttgttcgatgccaacttatttaaatgatttaagagtctttatcagtattctaagttcttctatagtttatataaaaaaggagtgactttaaattaaagtcactcgtaacgtatatctatttatagaaatgattaattttaaattaaataaccgtgcaccttcgaatcgaatgtacatcataaacgttaccgaagtcgatagctaaatctcggctaccctacggcacatatgagtgtccacttaatgctgcttccgtcaggacctgacatgattcatgggttcatattgcataggaccgaaatcttcaaacacctcgtgcttcgggcagacttcacaaaagtacaccctcaacgaaggaattaagtctcgcataaagcggatttcgagtacagggaaccgctacctccccacctagcacggtaagttttataatactataaaacgtattaacgttgcaagtaaaatagtatatttatttataaatcattcaagttaaaaacaaattcaaaaatattactatttattttgtcgacgagaaaattcattaaacttaaactctgtcgctaaatgctttgaaacattatattgaaatcgcgtcgtatctttaagaaaaacggtacttcttactgtcgctgtatatggatggtgcactttaccaaacacttgatattcaaaatccttaaatggttcaaatgtaattgatttattggaatagctaatatttaaatgaagttctttttctaaataatcataaatagactttctagctatctcattagatattttaggaactaatgatgttagaaaataatcttcatctaatattttaacttttccatccacacttctacttcttactacatgacataataaatcgttatttcttaaacacaattgttctttcactaaaggaacatcagacgcctttattatttcatttacaagtacatgtgtttcatgagttaagtttaacttttctttaacttctttaaagctaattaaatctgaaaaaggaaattcagtgatatcttgttgaataactatcgatccttttcctttaattttttgaatcatcccatcatttgcaagtaattcaagtgcttttcttaccgtttctcgagatgagtgatacgtttctacaagctcacgttctgacggtagttgttcaccatgtaagtatattccctcagaaatatctttttttaatttttcataaattactgcaaatttttgttgacccatttttaatttttcaccctatcatttatatgacttactaacaactatcgcaccatatggtgaaatcttattgtcaagaattgtaccactttgaataataatatctcctactatatcaagatcatctggaatcctaacagtttcatttgaaaagttagcaataattaaccaagaatcatttttatagttgcgacgataaataaacaattgtggatgatccatatacaatggttcaatatctccataagtaataatatcataatgatgacgtaacttaataagttgacgatatacatgtaaaactgaatctttattacttatagcatcttcaacattaatcgcatctatattattaggtaaatctatccatggcgtaccagatgtaaaccctgcattttcattttgattccattgtataggagtgcgtgaattatcacgcgatttttgggataaaatggtcaagatttcttcttctggtattccttcttcttttagatgtgtatacgcattacgagattctacatctctatatttttgtattgatgtataatgagggtcagtcatgccaatttcttcaccttgataaatatagggtgtcccttgtaacatatgtaacgcaatagctaacatttttgcgcttgcttgacgattcaattcatttgtatcatcgccaaatcgtgatactactcttggttggtcatgattacaccaaaaaatagcattccagccaccaccattatggatacctacttgccattccattaaaattttctttaatttaagaaaatcatatttttcatttgtccacttttcaccatctttataatccacttttaaatgatgaaaattaaatacactattcaactcttgacgctcaggacgtgtatatttaatacaattgtcaatcgtcgttgaagacatctcacctactgtcatcatatttctatttccaaaagtatgacggttgagttcatgtaaatattggtgaacacgggggccatcagtgtaaaattcttttccgatagcttccgaatttttaaattcatctttagaaataagatttattacgtcaaaacggaagccatcaacgccaaattgaatccaataatttaccatttcataaagtgcttgtcttactttttcattatcccaattcaaatcagcttgtgtcacatcaaataagtgtagatagtattcatctgatttctcatcatatttccaagcatttccaccaaatttagattgccaatttgttggtggtccatctgctgatgatttgaaaaaataaaaatctcgataaggattatcttttgaacgaattgcttccttaaaccaatgatgttccgtagacgtatgattaattacaatgtctagcataacttttaagtctcgacgatgtgcttcataaatcaattttttaaaatcatctaacgttccaaactcttcattaattttaaaataatcactgatatcgtaaccattatcattcattggagattcataaataggtgtaagccaaatatagtccacgcctaaatactttatgtaatctaatttttcaataataccattcaaatctcctttaccgtttccagtcgtatcattaaaagatttagggtaaatttgatacactactgattttctccaatcgttttgaatcatatgaatgccacctttatctaaaaatatattcttcaaaataattaattattcacatcttataatgaaagttcttaagtctcattttatatcatccggattttctaccatttctttagctttaactttagtgaatttagaaaaaaccactgttaatactgctggcaaaatcattgctaataggataacaggtatataaatataccaatatttactttggattgaaataaaagctggaacgcctcctacccctacattaccaagtactcggtttgctccaatgactgcccctaaaatacccgatgtacaaatagcagcaaaaaacggtacttttaaaggtaaattcactccaaacatagctggttcagtgacacctaagaaagcagaaacgccagatgttaatgctaatccttcttcttttgccatttttcgacgtttataaattaaccatgcaccaaatgcagctgatccttgacaaatattagaaatggctacaattggccataaataagttccctttaaagaactgcccatcaattgaaaatccactgctaagaacatatggtgtaatccagtaataacaagtggtgcatagaagaaaccataaattgcgccccctaaccaacccgcatgttcaaaaataaattgtatagcacctgtaatcgctgttccgatacctaatgctataggcccaataataataaatgataggaatcctgtaattaataatgccacaggccctactacaagcatcttaattgaatcatgcacgactttattaagtgctttttcaattaaagaaagtacataagccgcgataagtaccggaaggacttgcccttggtaatttagttgtttaatttctaaaccaaataaattccatgtaggaatttggcccttagctatatcatattgtgaaacaagttgaggatgcattaatatcaaccccaacactaatcctaaaattggactacctccaaagactttcatactactccaaccaattaaagctggtaaaaagataaatgctgtactagctatgacattaataatattagaaatatcacctaattgatgatgttgttccactaaggccttaggaccaaataaatgttccatagttaaaagattattaatccccataagtaaaccagctgttactagtgctggcaaaattggaataaaaatatctcctaataattttactaatcgttgtaatggattccctttttttgcagcggcagtttttgcttcatctttagatgcagtttctacaccggtttcatttacaaactgtttatacacttcatctactgtaccaggaccaataacaatttgatattgattgtcagctttaaattggcctttaacaagcgtattattagataaagcttccttatctactttattatcatctttcaaaactaatcgtaatcgcgttacacaatgagtagcagtatctacgttttcttttccacctattgcttgaacaatatcttgtacatcttttctttttacactcacgatgtccactcctttgtttctaacttaaacaaagtataacttgtctagacaagttgtgtaaaggctttcattaaataatttaattttttaaaatttagtacataaaaataagcactcagtaagttactgagtgcttatcttctttatattgattagtcttggattttaatgataatggcggaggaagagggattcgaacccccgcggcccgttaaggccctgtcggttttcaagaccgatcccttcagccggacttgggtattcctccaatgaacacaataaccatcatataatattattcattggaagtcaatctttttatattattatgctaaaactttttgtttgagatattgatctactgatttagctacagctcggccttctttaattgcccacacaactaaactttgtccacgacgtgcatctcctgcagcaaataccttttcttgatttgtacggtaatcatgctcatttgctacaattttattttgtttggttttaatatcaaatgatcgtggtactgttgtttcagttccttcaaatccgattgataataatactaaatctgctggccagtgtctttctgtaccatcaaccactaccataccttcaggtgtttcttctaaaatttgggtataaacaccgcgaatattacccatcgtatctacatcatatcgcatagtttgaacaccatatgcacgaggttctcttccaaatcgtgcttcatattctttatgagcataatccattttaaatacaggtaacgctaaaggccaagacgtgttactttcaaatgtaatctcttctggtgcttttgtatacttgttaaactgtacaatagatttacaattttcgcgtaaagctgttgctacgcagtctgctccagtatcccctgctcctataacaattacatttttatctttagccgtaattgaagcttcttcaatctcaccatttaaaacttgcatttgctcagtaaggtaatccatagcaaaatgaataccttgtcccattctaccttctaaaggtaagtcgcgtgctttttgagcaccagtacataatataatcgcatcaaattgttcttctaattcatcacgtgttatatctacaccgatattagtatttgtcttaaaagtaatacctgcctcacgcatgatttcaattctacgtcgaaccacagttttgtctaacttcatatttggaataccatacattaataaaccacctggttcagctgctctttcaaagacagtaacttgatagcctacatgatttaattcttccgccgctgctaatcctgcaggaccgcttccaacaattgccacgctctggtctttgtgttcttttggatattttggttttacccatccattgtcataagcttcatcaataatcgtgcgttcgatgcctttaattgctacagaatcacgattaattttcataacacatgattgctcgcatggtgcaggacaaatacgtcctgtaaattcaggaaaattatttgtctcacttagacgttcgtatgcttctttaaagtcttgatgataaactaaatcattccattcaggtatataatttcctattggacaaccaattgtttctcgtccgaaaggaagtcccgtttgacaaaatggcgttccacaatccatacatcttgccccttgaacagaggcttcttctctagaaaatcgttgttggaatgcttcgtgtccttctaaacgttcaatgagtgacaattctgctaatgattgtttctcatatttcataaaccctttaaactcacccataacttttccttcctttctttaataaatcacagctggttgcaagtctttttcaatcgatgtgcgatgatcataaaatgcagctaattttgcttcgttatcttctgataaatgacgacgttgtaactcaattttttgcatcattaattcataatcttttggaattacttttatgacatgttcagtgacattttcaaattgatttaagatatctttagcttttgtactttctgtataacgataatgttcttctaacattgatttaagtaactgcttttcttcatcatgttgcacacgtttaaatgctaatgttgaaagttgattcgcttttttaaatgcttcgatatcacttgggaagatgtaacttactccaccactcataccttggccaaagtttttgccaacatcaccaagtataactacgtgtccacctgtcatatattccaaaccatgatctccaattccttcaacaactacatcaacaccactattacgaatacagaaacgttctccagcactgccattaatataggctttaccactagaggctccatagaagcatacattacctgcaataatttcattttcacgagcatgctttggtgctttcacaacgactgttccaccagataatcctttccctacatagtcattggcatctccagtatgatgtattaatagtcccttaggagcaaatgcacctaaactttgcccagcatggcccatcgtttccgcaataatcgtttcttcaggtaaacctttactaccatgttgcttcgtaatataactacccgtaattacaccaacatttcgttgagtgttattaattgtatattgtcctttaaatgtttccccattttcaatactttgttttgcctctttatataaataatttaaatcgaatccaatatctaaatgatgattttgagctatttcttttgtgttcggtccatcaactgcatgaagtaatttctcaatatcaagtgatgcagctttagatttaggattaatatgacgagaacgttgtaataagtccgtacgtcctactagttcttcgactgttttcaaaccaagttctgcgagaacttctcttaattcttcagcgatgaaatgcataaaattgacaacgtgatccgctttacctctataaagcgcacgtaaatctttattttgtgttgctattcctactggacaagtatcattatgacacactctcatcataatacacccgagaacaacaagaggtgcagttgcaaaaccaaattcttctgctcctaatgcacacgctaatgctacatctctacctgttaataacttaccgtctgtttctaaacgtacacgactacgtaaatcatttaactttaatgtttgatgtgtttctgctaaaccaatctcccatggtaatccggcatgttgaatacttgttttaggagatgcaccagtaccaccgtcataaccactgactacaattttatctgcaaatgctttagctacccctgaagcaatcgttcctatacctattttagatacgagtttaacagcaatatcagcatctttatttgcatttttcaaatcgtgaatcaattgcgctaaatcttcaattgaataaatatcatggtgtggtggtggcgaaataagcccaatacctggtgtagatccacgtgtttcagcaatccaaggatatactttagtgccaggaagttgtccaccttcaccaggttttgcaccttgagctactttaatttgtaattctttagcgtgttgtaaatactcactagttacaccaaatcgtcctgatgcaacttgtttaatcgcacttgataaataactgccatcttcttgaatgacatatcgtttaggattttctcctccttcaccgctattactttttcctcctaatttattcatcgcttttgctaaagtttgatgtgcttcctcagaaatagaaccataactcatagcacctgtgttaaagcgttttacaatcgattctacagattctacttgctcaataggaattgatgattgagatttaaattctagtaaatcacgtaaatggtcgtgtctattgtcatgcacagcattagtaaatgttttaaattgctcataatcattttcacgacaggcatgttgtaataaatgaatcgttgttggattaaatacatgatgttgaccttgttgacgccattggaagttactaccagaagctagatattcttcttcattactttgacgttttctattttcttcatcaatttgttcaatacttaatcctgataatttagattgcgtccctgtaaagtaagtatcaataacattttgagataagcctactgcttcaaatatttgtgcaccatgataactttgaacggtagaaatacccattttagccataactttaataacgccttctgataaaacatttgtatatgtttcaacattttcagaaattgaaccttcaagatggtgactatcagttaaatgagcaatcgtttgttgtgctaagtatggaatgactgcattagcaccatatccaagtaaacaagcaacatgatgcacttcacgtgtttcacctgataaagcaacaatacttgtactcatacgtaagtcttctttaataagtaattgatgaatatgacttacagctaataacattggcatagcataatgtaacgactgagttgtattgattagtgcactatcatctaacactaaaattgtataaccttcttttgtagcttgaaccgcttcttctcctatatgatttagagcttcttcgagtgaaatatcttgatacagggtcgataaatgtttcacgttaaacttactttgttcaattttatctaattgatttaatgtaagaactggtttagtaagttgtatacgatctaagacattcggtactggatgaagtaaatttccttcactacctagataagataactcacttgttacaatcttttcacgataagcatcgataggtggattcgttacttgagcaaacagttgtttaaaatagttaaataatgattctggtcgttcattaagtactgcgagcggtgcatcataccccattgcaccaataggatctttttttcctaccaccaaatctgtcatatatttatgaatatcttccttagtgtagccaaactgcttttgtactttaaacagtgttgcttcatctaataattgacgttgatattgaacttcgtctaattctaaatcaatcttgtattgatcaatccaatctttataaggatatttatgtgcaatatgagttttaagttcgttattttcgatgactttattagagttaaaatcaacgagcaataatttcccaggattcaattgtcctttaaacgcaacgttttcttctggtacatcaatcacacccacttcagatgagaaaacaataaaattatctttagtgattgtatagcgtcctggtcgtaatccatttcgatcagttaatgcgccaattttatcgccattacagaatgaaatcattgttgggccatcccaaggttccattaaatagctataaaattcataaaatgcacgtacatgttcatcattggatttattatataaccatggttctggtataagtaacatcgccgcttcttcaggctccattgctaaacttaaaaactccaacgcgttatctacaatagctgagtcgcttccatcttcatcaacaatattttgaattttttcactttcatgaccaaataaagtattaatcagttgacgctgacgggcacgcatccagttaacattacctttaatcgtattaatttctccgttatgcataagaagtcgattaggatgtgcacgtttccaactagggaacgtattcgtactaaatctagaatgaacaagtcctaattttgattgataatcctcattatttaagtctaggtataacgtcttgatttgatctgaacgtaaccaccctttatagacaatcgttttatgagacaaacttgtaaaatataattctaaatgctcgcgttctgcatattgttcaatttgtttacgtgctaaataaagctgtttaacaggcgtttcgtgttggtttaaatctacaaatacttgttgtacataaggcattgtagaagcaacatgttctgctaatgcttgtgtgtctacaggtacatctctataaccaattactttcaatccttcatcgttaaagtattgattaaatacaatttcatgctgtgtatctaaaactttttgattagagaaaaaaaggcctaccgcatattcgccttcattaggtaagtcgaaatgagtatgttttttaaaaaattcgaagggaatttctgtcataattcctgcgccatcaccagtaataccatcagctccaataccgcctcgatggtctaatctacgcaacatttctaatgacttttcaataatatcgtgagatcttaaattatccatattggcataaaaaccgattccacatgcatcatgttcctcacggtaatcatataatcctctttttagtttatctttaaacacgatgcccactccttttgagaattttcagaaaatttactgttaataataattaatataatgtaaaatatttatctgaacaatatattaaatagatgatatcattctaataattagaatattttacgatatacttatattaaggaggtaaaatatggaaattaaacaattacgatactttgttgaagtcgctcgccgtgaacatatttctgaggctgcattggaacttaatattgctcaatctgcaattagtcgccaaatcaatttacttgaaaaagaattacaagttccattatttgatagacaaggtcgcaatatatatcttacttcgcacggtaaagcgttactcacacaagcaactcacatactagaacaacttgatgaaacagtggctctttttcaacaagaacaacttaaaaacgctcatcatatcaatttaggttttgaagaaagctatgcttctcatatgattacgcctattattcaaacgtttgaaagagaatacgatagtcacattatacctagtttaatgaatcatactcagatagtagactatttaaattcaggaaaaattgatatagctattgttgagaatacacctgaactacaagcaaactcaactttttcaattacatctttatatgaagaaacatatcacttatatgtacctaaagacgatgctattgccttaacatttaatccacccttaacacaacttaaacaatttgaaaaaaatcctttatatacacttcacgttttgcctgattctattaaaaaacgattagaatctgtaattaaagtacctatatacacactaggtacaacgtctcttggtcagtatctattaaaacaacgtcgtggccatctactcttacctgattatatatcgttggatcattcatctgaacaagtagaggatatctctttagcacatacagaattaaaacgttcattttgtgtggtatttaaaaaagacaataaaaaagtagatatctttaatctatttcatctcattcaaacattgctaagtaaagtttcaacatatcactaggtcttgtaacgaacactaacccataacatatgaattgaatatcattttgaacacgcgtataatcactttattgcgataaagggtaaattatataattaaaaagaggattatatttaatgaatataaagagacttcacatacctaaaattaaaaacactcatcgtctaattattattgttactttaataatgattggattatttatttttacattttttaatgcttcattttatcaaatacctattggtaaaatcacgaatgtcgaaacaagtcatggtcaaaaagtcacagacgagcatcataatactgacacaacatataatcaacgattaactatacgcattctaaacggtaaatataaaaacgatatcacaactgttaataatcattttgtaacatctcaagcagattcagagcaattttctaaaaatgaaaaagtattgttacatatacaaaaaagtccatctgatgctactattctagaaaaaaaacgcgatggccttactgtggcgattgtaggcgtatttatcgtgacacttttaattgtaggcaaaaatgtagggttacaatcaattctatctctactatttaacactgcgtttattattgtttcaatagtcattcataatactttttcaggtacaaatttatttttattaatgagtatagccattattttatcaactattattacattagtattagtaactggctggcaaaaacgaacttgggttacgataattgctactttatctggaacatttttatgtgtagggattactgaattattaattcaatttacaggtggtaatggaatcaaatatgaaacaatgagttttttaacgctacctccaaaagatgtctttatgtcttctgttcttataggaacattaggagcggtaatggatgtagcaattacaatttctagtggaatgtacgaaattctccagcgtacgcctaacatttcaatgtctcgttgggctttagctggacgtcatattggccaagatattatgggcaccatgaccaatattttattattttcatatttatcaggtagtctagccatggtattaatttacttaaaaaatgcgaatacatttacttacactatatctatgaactggtctctagaaattacacgtgcactgactggtggtatcggtattgtattgaccattcctataacaataggacttatggtcactatatttaagtggaaaggagtaagccgatgactacaatttttttactcgcactattactttttattttaatgattttgcttggcggtaaaaaaggactcatctcctatctcactttatttttaaattttattattcttattattagtattgttttcattctgtttggcatgccaatctatcttgtagcctttaccttttgtcttgtaattgctgcttgtaacctctttattttaaatagttacaatattaaaacacaagccgcatttatcggaactatagtaacaaccgtccttcttatcataggtgtctatttatctgtaaaatttggacatctacaaggttttgctacagaacaacaagatgaaacctatatattttcaatgaatattgatattaatatgctacaattttctgtttttactattatgttggctgtcatcgctgctgtaatagatttaacgattacaataagttcaccaatgtatgagttgaatgaaacaaaccctgatctttctcgtaaagaattatttcaatctggtatgcgtgttggcagagaaattcttgctacttccgctaatacaatttatttagcttattttggtggacaattaacattattcttttggttttttcaacttcattattcatttgggcatattttaaattctaaaatttttgctcaagagtttatctccatcttactaggtggcattgcagtcgcgttaagtattcctatcacggcttgggttagtgctcggttaattaaatatcatcaacttaaacaaacagatgaccacactactacttcatccttaaacgaagaaatagaatagtaaagaccaaacagtggcatttaatgattgaaagcatccaatgtcactgttttatttattcaatatttatattgaaaatgtttcgatccacttaatgacagctggtgcgatatattgtgtatcggatttattgaaccagcgaatatcagtaacttcattatcaatttgaacgtcattccaattaatacgttgattaactttaaatccatttaattcggtcaaagtatttggttgaggataggcttcaccaatcacttttccaatatatgtaaaatcttcttgagaaaaataaagttgtagttcttcttcaatttccctttgaatagcttctaaaagcgtctcaccttcatcaattttcccaccaggaaaataatatttttctctgtgacgaacttgtaccagtaaaatttggtcctctgtttcttccactaaacatacacatttaatcattctattcatccttattaaaacattctcacttcaaaaaaataatttaatttagtatgatattaacatacattaaaacaaagtttagaacaaattcttaatgagtaatataacattcagatttgttttttatttttatggaggtcttgtatgatggcaaaacaatcaaaactttcacgcttatctagtttagtaagtacagcaggatttattgtggatggatataatggaattaaatatagtgccaaaaataaaaatctagtttatctatcactagcacttagcacagcggttactgtgttcgattttatagtttctatgagatccccacgtaaattccgtaaattcacatcatttatctcatttattgttaatgtgacacgcttagcttcaagctttagaaaagttaaagaagattatcacttcgaataaaaaaacgagcctaagacataatgaattgtcttaggcatttttaatatattgacagtcgatgactgaagtaaaaatacgctagtatcaagcttttttcaattttagttccagattcccaacataaagactttcaagaaaaaagtttatgtccaacgcaaattgggtatgcgttgccaagataggacgacggattcaaaatgaatgctgtccgactttctttgtttttttactaatgaataaatttatattgtctaacttgataagctggaattgtacgatatgtcaaaacccctggacctgcactaaaattcatttcagatactaaaagacttccattactattgacgcgttctacaaaagcaacatgtccatagtagccagcatctgattgggcaattgatcctacagtaggatgataatcaattctatagccatctcttgcagctgcattgtcccagttatttgcattccaccaatatgtactaatacctttaccgatttgagcacgacgattaaagacatgccatgtacattgaccccaatcatataaatttctatgattaaaaatcggtgtgtgataataataatttgatgatgaacttgtacgatttgtattactacttgatgatgctgtgccgcttacacgtaatttttgacccgggtaaataaagaaattatttaatccatttaaacgcataatattttgatatgtcgtattatatttccaagcgatgcccgataatgaatcaccgtaacgaacagtatagtagcttgaagaactagatgaatttgagctattttgtgtgtggctacttgaacgtgctgttcctgaaactgttaatgtttgacctggaaaaattaaaaagctatgaagtccatttaaatccataatatggcggtacgttgtaccatatcgactagcaattgatgataaactgtctccactttttactgtatatgtactgcttgagttattactataagaatgagatgaactagagcctgaaactgttaatacttgatttggaaaaataagatttgatgtcaaaccatttaatgattttaatttagctattgtaataccatagcgatttgaaatagaccataatgattccccactttttactgtgtgagttgttgctgcttctgcttgatgtgcaaatattgtactaagtgccccagttccaataattgctgttgcaagaacttttttattcataaataagcgcctccttaatcttatgcttatctttgatatgtccccatgacaattgttgtattaacgcttagttttattacgttaattctagtgctttaactttaattttttctactcaagtagtctacttatataaattaatatatttcattataatattccatttcaatttgattacataatgatgaaattttagtacgatacttataaaattaaaactttataaaaatcgatttctttagtctaattattgcataacgtaagtaagaatttttttaaatgtgattatatttaatcaaaaatttattatactattgaaaatgatataaaaaaagagcgggacagcattcatttttgaattagttgtcccactccaagagtcgaaaaaagcttgatctatgtgtatttttaattcattaatctacgacatatgctaaatgactaaacaacgattgatattctacaatgtttaacttactattttaagctatcttcaatgtctttaatttctttttgagataaatcgactgctttttcaccatctttagtgtcttttttcaatgcttcttgtgcttctttactatgatatagatctacaatttttttgtatgttttattatctttatcttttgagttaacggcaattaaattaatgtatggtttaactgcatctgaagtagaactttctaaataaattggatctttcttagcatctaagcctgctttcgttgctacaccattattgataactgaaatatcaacatcatctaatgcacgtgcagtttgttgagcatctacttctttaatttttaaatgtttagggttatctttaatatcttttgttgtaccacttaaaccaaagttatcttttaatttaataagtcctgctgattctaataattttaaagcacgcgcttggttagaaacatcattgggaatcatcacttgcgcgccatctttaacatctttaatatcttttacttttttagaatagatgcctaaaggtgctaatacggttgtactaattgcttcaatttttgcatctttatgtgcttttttatattcatttaagaaagcaaagtgttggaatgcattcatatcgatatctccatcacttaatgctttattaggtacgttataatctgaaaagtgcttaatttctaaatcaatatcatctttttttgctaattctttcactttttcccaagcagcagtatcatttgatgctacgccaactgttactttcttactatttcctccgcctgaacatgccgcaaggacaataatagatgctaataataaaccgattattctcttcattaaaaactgcctcccaatattaaaataatttatttaaataactaatttctgcgaattattctagaaataaagttacctaatgactgaataatttgtacgataataactagaactacaactgtaataataatgaccaatgtatcaaagcgttggtaaccataaacaagcgctaaatctccaataccaccgccacctacagcaccggccatagctgtactaccaattaaaccaataatcgctgtagtaatagctagtacaagtgaacctaatgcttcaggcaataaaaaatgacgaataatttgaagtggtgatgctcccatagcttttgctgcttcaataatgccatcatctacttctaaaagtgaattttctactaaacgcgcaatatatggtgctacatatactgtaagtggaacaattgcagctgttgtaccgattgacgtacctgcaactaatttagtaaaaggtacaattgcaattaataaaatgatgaatggaatagatcttaaaatattaataattggattaagaatttggtgaataacgacattaggccagactccatgttttcgagtgactacaagtaaaatacctaatgggataccaatcaatgcaccaataattaatgatactgttaccatataaagtgtttcatacaatgcttgcattaattgagatgaatctatgcttgaaccaaacatttaacgcacctcctcataatgaatatgtcgctcattaaaatatgattctaccgtgtcacgactaaattgtgcatcgtgttcaaagcgtaaccataaataacaaatcgtttcatcttgaatatctgacatagacgagaatagaatatttacattaaaaccatattggtttattaactcgttcattaatggataatcaatttgctttttatctaagaaaagtctgtaatctgtataatgattatctgctctttcaaatgaggcacgtaatgctttagaaggctctgtactaataactgttgatacaaaattttgtgctgttttcgttttcggatgactaaacacatcttttactgtaccaatttctacaacttccccgtgttccattacagctacacgattacagattttttgaatcacgctcatttcgtgagtaatcatcataatcgtaaccccaaatgtttcattcacatttttaagtaattgaagaatagaacttgttgtcgcagggtctaatgcacttgtcgcttcatcgcacaataatattttaggatttgttacaagtgctcttgcaattgcaacacgttgtttttgtcctccggaaagctcatctggaaattgatttttcttatctgcaagtcccacaaactctaacatttcttcaactttctctttaatctcagaattacttttgtgactaagtatcaatggcattgctacatttttaaaaactgttttagaatttaaaagattaaaatgttggaaaatcattcctatatctttttttacgttgcgaagttctttttcactatatgtattaatatcatgtccatctacaataacatggccctctgtagcttgttctaattggttaactaaacgtactagtgtacttttaccagcaccactataaccaatcacaccaaacacatcacgcgcatcaattttaaaagaaacatcttttaaagcgtggatggtttctcgtttctttcgaaatactttatttacaccctgaaattcaatcactatgttcacccttatctaattctgattaaattcgtatgatatgaagtataggcaaaagttgaggatgcgtcaatatagttttttaaaaaattgaaaatttcagatatttttagtattgaattactcttttagttccaaatatcataataaaaatacaagagtacaataaacatcgtttcaatttctattgcactcttgcattaatactttcactatattctatttatttagcgtatctatcgcttgttttaaatcttgtactaaatcttcagtgtcttcaataccgattgataatcgaactaaaccatctgtaattccttctttagcacgaacatctgctggaatagatgcatgtgtcatcaaagcaggtacagaaatcaagctttccactgcacctaagctttcagcaagcgtgaaatattgcgtttcacgaattaattgtttagctgcttctgtatctttcacttcaaatgcaacaacgccagtatgaccacttgcttgagcgatatgaatatcatgattaaggtgactttcaatactaggatggaacacttgttgtactgatggatgctcttgtaacatcttcacaataccttctacgttacgattaatttgttccatacgtaaccctagtgttttaattcctcgaattaataaataactatcttgtggtcctagtacgccacctgtagagttagaaataaatgctaagcgttcacctaattcatcattagatgtagcgactaaacctgcaacaacatcactgtgtccaccaatatattttgttgctgaatgtaatacaatatcgattccaaaatctaacggattttgatagtacggtgtcataaatgtattatcgactacagaaatgagatgattttctgtcgcaatttctgctgcacgtcgaatatctgtcacacgtaataaaggattagacggcgtttcgatatataacatttttgtttctgatttaatataatcttttacgttttcaatatttgtagtatcaacgaaatcaacatcaataccaaatcgtgtaaagacttttgttaaagcacgataagttccaccatacacatcagaatttaaaattaaatgatcacctttatctaataacattataacagcactaatcgcagccatacctgaaccaaatgcaaatccatgtttaccattttctaaattcgcaatgacgctttcaatagaagtacgtgttgggtttgcagtacgtgaatattcataaccctgtcttaaatcaccaatatcatcttgcaaataagtacttgtttgataaattggtgtcgttactgctccagtaaaatcatccgtcgtatgtccaccatgaatcatttgtgtttttttcttcattattattctcctttgtattcaaatattttttttgacatataacgatcactgccatctggaaaaattgttacaataatacctttatcaatgcgatttttaatatctaaagcaccttgtaatgctgcaccagatgagctaccaacaagtagtccttcttgtttagctaatcgttttacattttcaaatccttgagtatcactgactgtaataatatcatcaacgatagatttttctaaaaatactggccatttttcggagccaataccttcaatatcatgagcatgtgctttaccaccattcaatactgagccttcaggttcaacaataatatttttaacattaaattgttgtaaatgtttagctacaccagtaaatgttcctccagatccagcaccagctacaaaataatcaatgtgtggtaatgcctctgtaatttcttttccaagcgtatgcgtataggcttctggattatgttcagtttcaaactggttcatatatactgcatcatatttgtcagcataatgacgggcttctttttgtgcacccatcattcccttgtttttaggtgttcgttttatttcagcacccaatactcgcataattgaaattttttcttctgaaaatccttctggggcaaaaatcacacattttaaatgataacgattagcggccattgctaatccaattcctgtattaccagctgtagcttcaacgatggtatctccttttacaacacgtttttcttttagcgcagtttctacaagatatttccctagtcgatctttaatacttccaccaggattaaattgttctaacttcgcataaatttgtacatgttcatcactaaaactttctaataatactagtggcgtttgtcctattaaatcataagtaatcatatctttcgttcaatacactcaagtaatgtctgaacatacctactttctatcatcatattcatttccaatatttaattttaattcttactcaaccgctatgaattatacgctaacttatatcttattgcaaaaagctagtttctttatgtaaaatgtaattagttattgcttttaagtactcatgttatgataaaagtgaaccactggaaatgaattaaattttacgatgaatcaacgtacaaaggagactcgatgatgacatctaaagcagacttatctttatccgtctttactaaggatgactataaaaatttaaattataaaaatagtacttttagaaactcaatgtacgacgaaattgaagtaaataaaagccactttaaacattgtgattttagtgaaggcatttttaagaatgtaagcactatttcaaattcaaaaattatcaattgtaattttgataaaagtatcttcgaaaatgtaaattttttcaagacgcttattagtaaatcaaatttaactgttacctcatttgatgaaaatcattttaatacattaacgattgaacattccatttttaaaaatagcaatatacgtaatgtaaaatttgataacgtcacgtttaaaaaagtgatctttgaaaacgtcactatggatttgtgtcattttgaaaatgtaaaaataaaagattgtatatttaaacatgtcactattaataattcttcaattcctgaaaaattattaaaagaattacataaacaagatgttacgtttgaaaatatgtaattcaattatcattatgctaaacagagtctagaacaacaatttgtatcctagactctgtttattcttgttaatattaaaataattgaacaataaaaattaatataataataactggcataatatatttaattaaaatataccatggaacaaaaagtttaaatttatcttttccaaagctctcttttaatgcttgtttatctagtaattgacctacaactaatgtcgttcctaatgctcctaatggcatcaagatattcgagacgataaaatccatattatcaaaaattgtacccgctccaaacttaactccacttaaactgctaaatgatagtgttgctgggatactaataacaaatactaatatacttgcaataactgatatagcttttcgtttagtattatcatttttagtgaaatttgagacatttaattccaataaagaaatagaagacgttaatgctgcaaataaaaatagaattaagaaaattaaataaaatacaataccaaagcccatttgattaaatactaacggtaacactttaaataagagtcctggtccttcttgaggtgcataaccaaatgtttttaaggctggaaatattgcaagtcctgctaatacagaaactaaaatattcataataacaattgacatggcggaagatttaatcgtcatttctttaggcgcataactcgcatacgtaatcatccctgtcgttcctaatgatagtgtaaagaacgattgacctaacgcaaataagacacctttaactgaaatatcttctattctcggttgtaatatatagcgaacgccctctaatgctccgtctaatgtcaatgatttagcaacaacaataattagaaaaacaaataataagggcatcatcattttagaagctttctctaaacctttttctacacctagcataacgatgaccatggttaaaagaataaaaatgccctgtcccaacacagttaaccacgggttactaattattttttcaaatttaatttgagttaatgacgtatgttcaacagataataattgtaaaaatacatttccaatatatataacaatccagccaccgataacactataaaagccgaataaaataaaaacagctaaatttccattccacccaataatatttaaccatttttttcctgttaatttactatagattcgagtcgtataagtgcgccccattattcctaccgtaaactccataatcagtaacggtaatcctacaaaaatagtaaagattaaaaataaaaataaaaatgcgccgccaccataaatgccagccatatatggaaacttccacattgcgcctaatcctatagcagaaccagcacttgctagaataaatccagttgaggttttccattgtgattgattactcattttctatctccctttaacgcgttaaagcatgtgtgcgattaagttctactctaacacgtctgaccaaatagtgcaatatacatataaatgagtattaaaaaagataagaatagaggtaaatgacatatctcaactattcttatcgtttaaacttactgctatatttatttttcaaaatcatatattatggattgaccttcatttacttcttgaatatttaaactttcgatatgatcaacgttaatgtaatgaacttgtgagtcatcttttaaaaataaatagaccaattcatcaaactcatcaataatacgctgtacgcatgtgtcatagtctggaccatcttggaacgttttaaattctttataagtagttccagaaactgttgtatatataagtaagaatgtacgtttcatcttattactcctttatttagatttaaaaaaagttacgacttgagtgataacgtcttcatgtccatctccataagtcattaaatgacgacttaacggatgacatgttaaatctttgttattactatcaatatgattaaaaatataatgtgcactattttgataaaaggcatcatcattaccgccatacaaaatacgagcgggaacttgtatacgttctaattcattagaaattacctcaataaatgctttaaattctgcgatatgtggttgataatcttgaattgtcccaagttgttgttttgaagtagtttcatcaaatttcaataattgattcatgcgctgaccataacgtttcatacgccacgcaatacttttttcttctttttcacttggtgcagacatcactgctattttagaaacatcaaataactcagctaactttaatgtaaatagtcctcctagtgagatacccgttacaaaaatagtgtcaaacccttcattttttaaaaattgatacccttctaatacatcattccaccaatcctgaatcgtaaattgagtaaattggtctaaaggtaagccatgtccttgataatttggtgcaaagcatgtgaagttttcttcattaagcgccttagctaatggttttacatcacgaacagttcctgtaaatgagtgaagtaataagatcgcttcttttcttgaaccttctaaataaattggatgtggtgatttgattttcatagtattctccccttcttaaaatacttatgttatgaaacttaagctttacttttttttaatttaatattaaagaatggtaacgtcattgaaaataaagcaatccaaatcattcctaacgaaaaaccaccaatgacatcagttagatagtgggcgtggaaatataaccgacaacttaatacacctatccaaaatataacgacaactatagcaatactatatcgtatcgctttatttttaataagtggaataacaactaagagtatagctaaagcaaataatgtactggcatttgaatgaccacttggaaatgaatatccatggtctactaaaagatggttatacggacgaggacgagctattatttgtttaattaagaaattaatataagttcctgtgtaaatcgtaactaataaccacaatgaaagtttataatttttaaaaattaagataagtgctaaaaataacgttatgtagagaatggattttacttctccaaaattagcacaaaacgtcatcattttatgccaaattggaccgtcatagtgtcttctaggtttaccaaaatagttggtcaacgcatgtaatgaatttaaatctaatttttgcacgagtgtggtatgataaatgacattcattgccgttattataaaaataattaatccaacaacaaacatagaaatagttttggttggcgatacttctaatttatctttcatacttgtttttcctttactacatttgatcctaatattttataaaaagctttcaaatgatgtatctgttcttcatatttattaaagtttgaagaggataaccacttattcaacctttctttattatcaataagttgtttcacatacgtcataaagctttctttatcataaaaaggttcgtcataaagatacgtccagttagcctctgaagatgtatcacacagttcattatatcaatcatcaatatgttgactacttaactcattgattgtattacccttttatacctctaggatcaggatagtcgggcaaatgataatgagtaagagattttccaattagctgattgaattgatcgcatctctatccctcttttaatgttagttagattttacaataaatgatgaaaatttgcttgtaaaaaaagagattaggaagtattttatataaagtttcctaatctcttctcgtatttataacattttattttaaagtgatttttcaaggttcttatctaacttaaaaacaataatacgttcaccagtaattgtacttaaatcactatgaaagcttttaacttcagtacctgtgactttgaaaacaagttgcattaaatcatcttgtcctgattccaccaattctgaccgtgtacgtttaatgttaagtaatccttcttgtgtttcacatacgcgatactccgcaggcgtcaaaataccttgtaagttgacgataatcatatctcgtaaaatatctgtctttactgacaacgaaccacgtccaagaaaatctttttcccattgcgtaattgctttactaatttctgcttcatacatgcctttcgatttcgtcattgttataacaaatctcctaatgtttaattaacactagtgtatcattttttaaattaaaatcgaatatcttaccaatctttaaaactaccgttttcatcaatacttgcaagacgtacccattgatgatcgactttttgtttaaacttaatattatcattaagtaaacgttgtatataacgatctggtgcttgaatcacgactaataatcgaattggagcgtgataaattttattgtctcctgccatcacggactgccatggcaatccagctaataaatcacttgagttcccttgcataacgccaacaccagaagtgacagattgtgttgttttattaccactaccataaaaatgcggtgccactgtagaggcataatactgtaggttaatccactgtgcaacgagtgctggaccagaaataattgtatttagtaattgaccatcaggatctttcgcataatcataattatgtaaaaatgcacgtccttctaaattactaccttctgtaatacttcgttgcccaataataaattctgcattacgtgctaaaccccattctggacggatttcgctccaatcatttgcaaagcgatgtgcttccgcaattggatgtttcaattccctatcgcttaaacgaggtaattgagcaagacgttctaaatttgcatgataacttacacgtggcatggcttcttctaaaatatcaaatgctttctttgcttctgatgttaatgagggaacgtaaatccattctaattcatcaattgatgttttatgttctgcagcaacaaatactgtctcatccggaataagaatgccttcagcggctaacccttgacgtactaaaggtaaattgcacatcatggcaagtaatttcgcattaaatccacttgaagctcctccacaagcaccacattctaatgatgcatggtagggattattgtttgtttcgcttccatgccctccaagtactactaatggtgcaaaatttgtagttaaatccattaattgtaacgcttgtttcgtaaaagcaatttgttcttcttcagtaaatccaacaggtaaatcactatgtacatgatgatctctatcaatcgttaacttagcattcggtttttttaaccaatttttagtaaatttacgaataaatgcacctgttttctttggcattaatgtacttgcaagtgtatttaaacttaaaaatggcccacttaattctggtaataataaactaggtagcacattattcttcattaatttaaacgtataaaacatggatgtaatagaatgttgctgttgattatacgtatttaatgcatgtcgctctgcatattctttaatagtatatgcaggaggcaccatcactggtaaagaatcatgactaaactgttcatctaatgctttttttcgtataggtaaaccaaagaaacctgcaattcctatcgtttcaaatggcccttgattttctaaatgacgacgaaatggttcagaacgtacatcgatacaaaatgcaagttgcacttttgtaggttgtttgtcacgcttgaccgatttatcgtaaatcatctcaacgagtttgcgttcgtgagtttcttcccaagcctctaaccataatttcttgaagtataatggattaaaatcatgggcaaacttcaagtgttcaatttgattctcaatggacatctcagcccattcatcaatagtcatttcaccataatataaccatttactcacaagttcttttattcttttttcaacatttaagactgccggacggctcattttttcagtatctaatagaatacattccattgtaaggcgtattgcaaggtattgagttaataaatctttttcatgttcatgtttttcagcacgataatacatcatgcctgcccaacctggtaacgataaaagatgtccagttaaataaaattcatattcatcttcagcaatatctagatgattgagtgccatgattaatgcgtcttcatagttgtgtggtaacatcttaatcattttacgttgcgttttagtcaacattggatcatatttcgctaaatgtaaccaggctacatagaacccttcttcgcgtttaggcattgtccaactggattggaaagtatctaaatataactttgaccatttaataatatgagtatttaactcatccattaaagattcgcctttagcattaaatgcatttgcactttttgaccgtgcataagcaaatgactcattttcgaatacttttttgagttttgagacttctaatttcagataggcttctttagtaattaaatctctcggaatatctttaatattcatagcatttttgcagtacgtatcaacgtgagtcttaggaatatccgtcttataagattgaatagcttgttgtacttcttcttcaacgatatgtttatcaatctcaccattttcaagcgccgtcattacagaagcatggcttggatataaatcaatatcacgcacatgtttaaaccattgcgcaacttgatcaaaggtttgatactcaagttcttcccatggattacgtgctgcaaagattgaaattggtgaaagtggcgtaatcacacgacgtgcagattgaacaacgtcttctatattaattgtcatgtaaatgttcacctcttataaatatttctttaaatagtttggatggctttctacagatttaaatttagcttctccaattttaattaaccataagtaaactttagcaaaggctgtagatgtacgatggcgagcgacccaaatactaaaaatactacctaacactaaaatcgcaatactaatgataatactaattaacggtggatgggcaggagccatatatacatgatgaagtatattaacaaatacttgatgagtcacaatataaaccattgcaacaactacaatcattgtaatacctataaagcgtccctttactcctttatttaatgccacaagctgattccatgatacagagatagaccatgctaagataaatgcactaatcaaaatatatggactatggtcacttgtcataaaaaacacaattgcaataatcaatgcaagagcccttccaagtattatccatccatatgatttcttaatattaggtggagttggtatattaaatcgtctgacaactgagcctgattgtaagaataacgtggctttaaatataccatgcaatattaaatggataatcgcagctgaataaacacccatcgcacattgaacgagcataaaacccatttgactcatcgttgatccaacaagttgtcgtttataatcaacatgtactaaactaatgcccgaaccaatcaatactgacatactagaaataattaataatattgtaagagcaatagaattatcaaatatcggtgaaaaacgcgttaaaataatgccccccgcattaactataccggcatgcataatagctgatacaggtgtaggcgcaacaactgattcaattaaccaactctgaaatggatattgcgcagctggaataataacagcaacaacaagcaataaatcaataactaattttagactatgatttagagcatagtcataattttgagaaggatcgattgtccattctcctgttcctatgtatagcaaaataaccgcaattaatagcgctaaccatccaataataaaggaacgtgcagaaacttttgctgcctctgctggcactttccaagttttattcaatctaattagttgtgttaaacaacataacgttaacccccaacataaagtcattaaacgtaagtcattgcttaaccaacctagtgaagcaaaaacagttgtaaatgtatataaaggaaaatacttacgataattgtgatctcctaataaataacgcgttgaaaacttttgaataataaaacctaacgctaaaacaaacgcacctactaaccaagcaaatttatctaatgcaaatatgccaataacttctctttcgtttatagttactaaccctacaatacctacaataactggtaatagaagtaaagctaagtgaaatcttatgtatttaactggaactgagggaattaatacaatcaatccacttaatgctgctataataagcgttataaaaaataatataagtaaactactcatacttaacattatcattcctccacttttaaactgtaacctatatataactattacttataatataataaaacacctacaatagtttagttttatcccattaaaaaaggacgactatctattgtaggcttcttttatgctcattcaatatatttattaatgctctttaagcaacctataatttagatttaagtacatcagttttacccttcaattaaacaataaagtgcatgatactttttgtctcattgcttgatataaacctatgtataatttgatgcatattaaatacaatatatgaaaatatcaactaaaagtcaaatttctaatataaaagataacagtcatatcatttcaactttcctttttatatcaattttgtttaaataataccccaaaaaatattataaactcaatctttaattactaatatataaaaagagtttgagacgataaagtatgtcccaaaccctcatggataaaatgaatttacttcattacttataaaataacatactttgttcaatattcatgtaacaattctgtgaaaacgcttaatttttttgtaaagtttttttatattttatttgctttttttgaataatgaaggatgactatcatatttttgtgattgccttagctattttgactttaaatttattttaatattaaatcagtctttgtaccgataactttaatgctttaacaagttaaactatattaaaataaagaaaggtataatacttatgcaaaataaacaatttacattaaccatttcattcataataagtagtctcatttttttaataactattttttcggtttttactaagtcgttatgggcacatatattagatttacaatcattctattggttcttaaatacatttggcgaaccaaaaatgaatttcaaaggtaattggttcaatgattttatgacgtttctagcatcatacggtgatattgcgacctttattacccttacccttatcatcgcaactatcgtattaattaagcgacgcttcttattagcaatatggttaccgacaacagtagcttcagcaggtatcataggtattgcgttaaaagacatcattcatcgttcaagaccttatgatcacttaacaattgatgcaggattttcattcccaagcggacatgctttaacaagtacgattgttatttttgctcttatttttgtacttatctctaaattaggaaatatgtggataaaatgcataataaatacggtgttaattgtagtatggttaggtattttattttcaagattatacttccatgctcactatctcactgacgtagttggcggtatcttttttagtctttcatggttattcatgtcattgatgatgtatcaatatatgcttcaaaaagtaaaccgtagagcgtcactacaacagagacgacaatcatttcaatcaaaaagaaattagcatagacgtccaaattattgaatttaatataaaaaaagcgagcatttctcacgaaaatgctcgtttttttaatgggctactcccattctatagtacttggtggcttagaagtaatgtcatagacgacgcggtttacatggtctacttcattaactatgcgactagaaattttttgtaacacttcccaatcgatacgtgcaaaatcacttgtcataccatcaattgatgttacagcacgaatacctactgtatgatcatacgtacgataatcacccataacacctacagattgaatacctggtaatactgtgaagtattgccaaatctctctttcaagaccttcttctcgaatcacttcacgtaaaatcgcatcagattcacgaacgatttctaatttatcttcagtaatttcacctaacacacgaatacctaaaccaggacctgggaatggttgtctccatactaaatgttcagggatacctaattcaatacctaaggcacgaacttcatctttaaataatgtattaataggttcaatcaattcaaattccatgtcttcaggtaacccacctacattatgatgagatttaattgtttgcgctgtctttgtacctgattcaatcacatctgtgtaaagtgtaccttgtgctaagaaatcaacatctgttaatttagccgcttcatcatcaaacacatatacaaattcattaccaataattttacgttttttttctggatcagagacgccttttagtttttccataaaacgttctttggcatttacacgaataatattcatatcaaaaccttcaccgaattgttccattaccatatcgccttcgcctttacgaagtaaaccatggtctacaaaaatacatgttaattgatcaccaatggccttatgcaataatactgcaacaactgatgaatctacaccaccgctcattgcacataatactttacgatgacctacacgttcacgaattttttcgatttcaatttcaatgaagttttccattgtccattcacctgtacaattacatacacgacggacaaaatttcttagtaaatcattaccgtattctgtgtgacgtacttctggatggaattgtacaccataaatacgacgttttttatcttcgatggcagcataatttgtacttgggctatcagcaatcacttcaaaaccttcaggaatttcaatgactttatctgaatgactcatccacactgtttgttcttctggtaaaccaaagaataactcatcagattttgctttaataattgctttaccatattcacgttcatttgcacgttcaactttaccgcctaatagtttggttgtaagttgcataccgtaacaaatacctaacactggaatacctaaattataaatctcaggatcaattgtaaatgaatcttcttcataaacagagtttggacctcctgaaagaataatacctttaggattcatacgtttaatttcatctatagaaatttcatgatcgtgtaattcactgtaaacgcccatttcacgaatacgacgtgtaattaactggttatattgactaccgaaatctaggacaagaattaattcttgttctttagccatttccataatagtaaatctcctttaaatttaatttatgtaaacaatagaaagacgcttttcatatttataaagacaatacatcgtttcaacctctataaatattttatagaaaagcgtactttcttaatttaatcgtttcttgctcaccttacattaaaatgaatagtttggtgattctttagtaatttgtatgttatgtggatgactttcagctaaacctgcagggcccatacgtgtgaattgtgcttcttcacgtaatgcttttaagtttggtgaaccagtataacccataccagctcttactccacccataagttgataaatggtatcttgtaatggtcctttataagctgtgcgaccttcaataccttctggaacaaattttctaggagacttatcttcttggaagtaacgatcatttgaccctttttccattgctccaagagaccccattccacgatatactttatattgtctaccttggaagacttcagtagcgcctgggctttcttcagtaccagctaataagctacctaacataacagcatgaccaccagccgctaatgctttaataatatcaccagagaatttaataccaccgtcagcaataatcgctttaccatgtttacgtgcttcagtagcacagtcatatactgcagtgatttgtggtacacctacacctgcaacgacacgtgttgtacagattgatccaggtccaatacctactttaaccacgtctgcacctgcttcaaataaagcgcgtgtggcttcagcagttgcaacatttcctgcaataactgtaagttcaggatatttatctttcatttttttgacttgctcaatcacacctttagaatgtccatgcgctgtatcaataattaacgcatctactcctgcttctacaagtttttgtgcacgaatttcggtgtctttagatgtaccgatagctgctgctgcaagtaaacgaccatgctcatctttcgctgcgtgagggaattcaagtactttttcaatatctttaattgtgatgagaccttctaaacgacccttttctactaatggtaatttttcaattttatgcttttgaaggattgcttctgcttcatctaatgttgtaccaactggagctgtaattaaattttctttagtcatcacatctgaaattttaattgagaaatcctcaataaaacgtaagtcacggtttgtaataataccaacgagtgttcttgattcttcatcttttacaataggcacacctgaaatacgatatttacccattaatgcttctgcttcataaacactttcatctggtgttaagaagaatggattcgtgataacaccattttctgaacgttttactttttgtacttcatcagcttgctcttcaatgcccatgtttttatggatgacacctaaaccaccttgacgtgccatagcaatagccattttagattcagttactgtatccataccagcagagataactggaatatttaatttaattttatctgataattctacgcttaaatcaacatcacttggtaatacgtctgatgcagctggaattaacaaaacatcgtcgaaagttaatgattctttagcaaacttattttcccacatttataacacagcctccattttttatatagttagtcttattatttcacattttcctcgttttgtttatactttataccgttaaaaaagaaattaagaataatagcagagattgctcctaaaacaataccattttgagttaaccaagcgaactgttctcctaaagctttaaatgcttgaggtacagcactaattcctgtaccaagtccgactgatacagcaataattaataaattattttgatttttgaagtcaatatttcctaaaatacttaccccataagccattaccataccaaacatagcaatcattgcaccgcctaatacaggtaaaggaataatattagccagagcacctaatttaggtataaaaccacatattaaaagtaagactaccattccatatatgattttatttttcttagctccagaaagtgaaacaagtcctacgttttgcgaataagctgtataagggaaagcattaaagattgatcctaaaatgatggctagaccttccgcagtgtaacctttacgaaaatctttacgttcaagcttacgaccagtgatttcacttaatgcatgatatacacctgtggattcgatcagacttacaattgctacaattgtaaacactaatgttgcaccgaaatcaaagccaaatcctgagaaacggaatggtcgtggaataccgagccaatgtgcgtcaccaacttggctaacattaactaatccaaatatactagccaatatcgtgcctataactaaaccaatcaaaattgcaatagattttaagaatcccgttgtaaatcgttgtaatagtaagataacaataagtgtcactccacctaaaattagatttttagggttaccataatctttagcaccttgaccaccagcaagataattcatagcaacgggcattaagttaattccgataattgtaacgacactacctgtaacaacaggtgggaaaaatttaactaaataagaaaagaatggagcaatgattacaactaagatacctgataggaacaatgatccatataacacgtctaaacctttagtctgtccaattaaaatcataggtgctacagcagtaaatgtacatcctaaaacaataggtagtcctgtaccagtaatcttatttgcttgtaaaaatgtagctactccacacataaaaatatctactgtaattaaataagcaatctcttcaggtgaaaattttaaacttgttcctacaatgataggtactaaaatagcacctgcatacattgctaataaatgttgtacacttaaaattaaatttttcattcatcttcacctagtaaagtcactttattccctgctaaggaagcaactttacataatgaagaaacagttaaaccagcctcttccaatctttgtcgtccatcttggaaacttttttctacaacaattcctatgcctactgtttctgctttagcttgttgtgcaatgtcgtacaatccaagtgaagcatcaccatttgctaagaaatcatcaataattaatactttatcttcaggccctaaaaattcttctgatacaatcactgtacttgttttatttttagtaaatgaatggatatcagtactgtaaaacccatcttttaaagtacttggctttgctttttttgcaaataagcatggcacatcgaaatgtaatgcagccatgattgcaggagcaataccggaagcctcaatagttaaaattttcgtaatccctttacccttaaattgtttataaaatgtttgacccacttcatacattaatttggcatcaatttgatgatttaaaaatccatcaacttttaatattttttcatcaatgactacgccatcttccttgactttttgttcgagcgcttccacttcaaaacctcctaaactttatataaaaaaacccgaaacttttatctagtttcaggatctataagtgaacaagtacgatacacattcatttgtaacttagaagtaaataatttagatttatagatgataaacgatactttacattatacaaatgataatataatacaagacatcttagccaatcctcaaacttctcattaacttccttacctttgtacttgaactcatagtcgcgttgtttatggcaacacggtagaaacttctaaagccatattcttcagattatatgagcaatataaattatttaatgataatagcaaattttaagcttattttcaataactgagggagagtttatccttgtaatcacgctacttataaatgtaagcgtttaatgtcttattaaaaaaaccgtatttgtaaattacatatttttaattatataattataacgaaacgttttatatctattcattagggtataattatttaaaagtagcatgaaatgatggaggacgatgaatatgccagatattacagttctagataatgaaaatcaaatttacaatgtgattgaaaagaaaaaagcagaaggatattcagaaaatgagatatttgttatcagtgaatctaaattacatttagatgatttacataattctcaagtaacacttatagcaacaagtggttcattcagtgatcgcatgtcacgcttattaaccggtgaagatggtgaagaagctgtattgaataatttcaaactatctgataaccaagcagaacaatataaaaaagatgtgcttgatggcaaatttttagtaatcactagaaaagacacttcttcacataatgaagttgaaaaaaacaacgcagcttatgaagaagttgatatcactcattacgctaatgagtctgatggtccaaaatcttaaaaataagtttaaccattcattgtatttaatcatgtcgattgttaaatgaacatacgtttttacaaagtaacagtcaaaaattaatatatgcttctttcaaagtaaagtgtgaatcgtttataactttgaaagaagttttttattatattttgtattatgatgtgctactttacacatgtgctatacttaaaaaaatataatgcgggagatcgctatgaaatttcacactatttattctttagaagacgcttattatcaaaaagctgtcgagttttataataaacaattagatgttgatttttttgaagacagcactatcacaaaacgatccttacagaataataaaacagaaaatgattatgttttgattgttggtattgagaaagaaaatataatcagtttggccacagcacactacgaagcaacaacaaattcagcaattctagtccacttattagctgtagttgattcaaattataatgaaatcatatctcaaactttaaatgaagttgaaacacacctaaatatattatctaataaagtacattctagagatattaactttttaatgattgaagtcccgaaacatgataatagcatattagataatcaattaattaaacgacgtcatcatatcttattagaaaatgactttgaacaacaatatgacattgactacttgcatcctaattatacgtttgaagaaacacctatacatactgacttatttattaaatctaacattgaacttacaaaagacatctatcctgctagtgtgaaatctaattatattctcaaatatgtttttgcgaatggaatttctagagatattatatatccccttttagaaaagatgaatttacgttcatccttatagaatacttgaaaagagcgatataaaaggttaaactaatatgcgaggttagactgacgtttcacttaccgaagacaaacgtcagcgtaaatgaatgaatatattatttaaatatgaaaggacttcattatgttaactaaagaatttgctcaacgtgtcgagctaagtgaaaaacaagtccgtaaaatcgtccaacatttagaagaacgaggatatcatcttagcaagactgaatatcgtggtcgtgaggctacagattttaaagaagaagatattgaacttttccaagatattgcagaaaaggtaaaacaaacaaatagctatgatttagctttcgaagaattagaaaaagaaaaagactttttacaagttatcgttaaagaagaccaacaacagttacctactgatcaaggcgttacacaattagtagaagacttacgtaccgaaatacaaaaaatgcgtgaagaacgtcaaatgttaggtcaaatgattactcaagttcatcaacaacaaaatgaacttaaggaattacaaagtcaaattactgaaaaattggaggcaaataatgagtcattagttgccattcaaacatcacaacaggccattcaaacagctcaaaaagaacaatctgattatactaaaaataatttggttaaagaaattaatgataacaatcaacaagcgattgatactttaaaagagcatcaaacttatgtttcatcttcaaatgagaaaaaaggattcttagctagactatttaatctttaatgtcacaactgtatatagtgctatttactaaaacaggattgaaattaaaaaatttcaatcctgctttttttgttttaatactcattttgtatctatttatcattagtttgtaaaaacatttaataatttatgttatttaaagtattgaattattatatatttaatactattcttattaaatgtgtcggatttaactaataaaaggagaatcattatatgggaacattattttcaattattaacattgtcatcatgttgattttcattatcggcttattcattatggctaaaaaacatgtatcattcccaaaacgagtctttaccgctctaggattaggaattgtatatggaattattttacaccttatttatggtgttaattctaaagtccttgaaaccacaactgattggtttagcatcgttggagatggctatgtgacattattacaaatgattgttatgccacttatttttatttctattgtttcagcatttagtaagatacaaattggcgataaatttgctaagataggttcttatatttttatgtttttaattggtactgtcgctattgcagccgttgtaggtattttttatgctattgtatttagtcttgatgcttcaagtatcgatttaggtagtgcagaacatgcacgaggaaatgaaattagtagtgaagcgaagcagcttacagcgaatacactaccacaacaaattcttgaattattaccaagcaatcctttcttagattttactggtcagagaacaacttcaactattgcagtagtaatatttgctatttttgtaggatttgcatacttacgtgttgcacgtaaacaacctgataatggtagcttattaaaacgtggtattgatgctgtttatgctctcatcatgtcaattgttacctttgttttaagattaactccttatggaattatcgcaattatggcttctacaattgcaacaagtgatttttcagcaatttggacattaggtaaattcatgattgcatcttatgcagctttacttacaatgtatgttattcatttaattattttagcgattatgggaatcaatcctattcgttatgttaaaaaaacacttgaagtactgatttttgcatttacatcacgttcaagtgcaggagcgcttcctttaaatgtgcaaactcaaacgcaacgtttaggagtacctgaaggtattgcaaacttctcagcttcattcggtttgtctattggtcaaaatggatgtgctggtatttatccagcaatgcttgctattatggttgctcctgttgctcatgttgacatcgatataccattcattcttacactaattggcgttgtagtgattagttcatttggtgtagctggcgttggtggcggtgcaactttcgcttcaattcttgtattatcaactttaaacttaccagttgcattagctggtgtattaatttctatcgaaccaattattgatatgggtcgtaccgctctaaatgtcaatgattccatgttagcaggtactggtacagcacgtttaacaggtaacttagataaagaaaaatttaattctaaccattatggagaattatccacagaatcataaaataacaaaagagacagaatttcaaacaaattctgcctctcttttttcggttttattttatcttttcattagtccagctttatttaattgctctaacatatctaatcgtgctttcccacttaaaaatccagcaacttgttgagaccaggtttcatttcttacaccatttgtacggtcttgatagtatttactaaccctttgatcataagtgtttaatgtttctttttggtgtgctttattgctattatagacatttttatggaagataagttcaaaaggtaaacgtggttttggtgatccattttcatccttagctggctctcctacagccataccaaataaagggaaggcatattcaggtaagtctaaaatctcacgtacacgcccgacatcattgcgaagcgaacctaagtatacaatgccatagcccatatcttcagctgctaaagcaatattttctgatactaatgcaacatcgatggcaccaactaataagccctcagccgactcaaatgacgtctccatatgttgttctacatcttcattaataagattgtgacgataataatctaaaacaaatacaaataaatagccattgtctaccacatattgttgccctgatacttctttgagttgtgctttaatttctggatcttctactccaataatagaatacgtttgtaaataactagatgttgaagcactttgtccagcttcaactaactttctaacaacaccttcacttaaaggttgatctttaaattttcgaactgaatgatgttttttagctaattcgtaaacataatctgacattaagtccactccttttttaattactgaatatatattaacaatttatattttatttttcttcaaaattgccctttattttaaattaagatttgcatgctaaaccaattaaagttatcataataatgacaattttcagatatcaaaggagagatactatgactcacgctaacaaagaagtttcaacagccttatatcaagcttttacatcaaaaaaaccgattaattttatcagttcctcttttgaactaaatgagttagaagcctatcacacacaagatgatctcattaatcaattaaaaaataagcaaaaatcagaaattaaaggttacaaagtaagtatgacaagtgccgccactcaagccattgccaatacaaatgagcctgcgtacggtactattttatctactcaagtcgtcgagggggataactctatctcattatcaacattatttgatccgttacttgaacctgaacttatttttgaattaactgcagacttaccagagcatgccgatgttcaaaccatcttagaaagtgtaaaagtagctccaggtattgaaattcctgacgcacgttataaagattggttccctaactttgctttatcagatttaatttcagataatactgccacaggtttaattgtggttggaaaaagagtaacacctcttgattacaaatcatttgctgatattaacttaaagttatttaaaaatgatcaagaaattgaaacaggacactctagtgacgtactcggaaatcctattgaatctataaaatggttaaataaaaaattacattcacatggaaaacgtttagaaaaaggtcaatttatttcttcaggtacatttatttcaccactacatttagaaaaaggtatttatgttgctgaatacgagaaagtaggaagcgtaaaagtagaagtcaacgactgattttaataaaataatattgaaaatacttgatactctcttcagatttatatgtttcatagcgtaacttgaagagagttttaatttattatgtttgatttccattatcaaatactttgatttagttgagaatagatttaagcgaaaagatgtatttatatttacaatttacattttttaatttaaaaaaataaacctcacaatatcttaaaaaagttaatatattttatatgaaccttgttatatcagtgctttatattgtttttcttacttttaagtgtattatgttgacgaaataaaatctacatgtaataatattaatcaagagattagaattattacaaataagcaatgattattatgtagttctaattaatattcgataaatcaggaggaatttaagttatgtctttaattaataaagaaatcttacctttcacagcacaagcatatgatcctaaaaatgatgaattcaaagaagtaagccaagatgatttaaaaggttcttggagtgttgtttgcttctatccagctgacttctctttcgtatgtccaactgaattagaagatttacaaaaccaatatagccaattacaagatttaggtgttaatgtattttcagtttcaactgatactcatttcgtacacaaagcttggcacgatcattcagacgcaatcagcaaaatccaatacactatgattggtgacccttctcaaatcatcactcgtaacttcgatgtattagatgaagaagcaggtttggcacaacgtggtacatttatcgttgaccctgatggtgtagttcaagcagcagaaattaatgcagatggtattggccgtgatgcaagtacattagtaaataaaattaaagccgcacaatacgtacgtcaacatccaggtgaagtttgcccagcaaaatgggaagaaggttctgaatcattacaaccaggattagacttagtaggtaaaatttaaggaggcatttaagtatgatgaatgctgatttaaaacaacaattacaacaattattacaacttatggaaggcgatgtagaatttagagcaagtattggctctgatgataaatctaaagaattaaaagatttattagatgaaatcgctgagatgacagatcatattacaatcgttgaaaaagaattaaaacgcacaccaagtttccaagtaagtaaacctgaagaagatactggtatcacatttgctggtattcctttaggtcatgagttcaattcacttgtgcttgctattttacaagtaagtggccgtgcgcctaaagaaaaacaagcaatcattgatcaaattaaaggtcttgaagataactacaattttgagacttatgtaagtttaacttgtcaaaaatgtccagatgtagttcaagcattaaacttaatgagtgtaattaacccaaatatcactcatacaatgattgatggtgctgtattccgtgaagagtctaaggatatcatggcagttcctgctgtatttttagatggtgaagaattcggtaatggtcgtatgacaatttctgatattttatctaaacttggcagtacccaagatgcttcagaatacgaagataaagatccatacgatgtattaatcatcggtggtggaccagcaagtggtagtgctgcaatttatactgcgcgtaaaggtttacgcactggtattgttgcagatagaattggtggtcaagttaacgatacagctggtattgaaaactttattactgttaaacaaaccactggatcagaattctcttctaatttagctgcacatatcgaagaatatgatattgatgctatgactggtattcgtgcaactaaaattgaaaaaactgataaagctatccgagtaactttagaaaatgatgcagttcttgaaagtaaaactgctattatttcaacgggtgcaagctggcgtaaattaaatattcctggtgaagatcgcttaatcaataaaggtgttgctttctgtcctcactgtgacggacctttatttgaaaataaaaacgttgcagttatcggcggtggtaactctggtgttgaagcagctatcgatttagcaggaatagttaaacatgtgacactatttgaattcgctccagaactaaaagcggatacagtgttacaagaacgtttacgttctttccctaatgttgatattcacacaaatgctagaactgctgaagttctaggtgaagatcatgttactggtttaagctatgaagatatgtcatctggtgaaatgaaagaattaagcttagatggtatctttgtacaaattggccttgtgccaaatacaaaatggattggtgacgcagtagagttaaataaccgtggagaagtcgttgtggatcgtgaaaataacacaaacgttcctggtatttttgctgctggtgacgttactgaccaaaaatataaacaaattattatatcaatgggttcaggtgctaacgcagcattgagtgcatttgattatattattagaaattaatttaaagtttaactttctatatgaaagtaagacttagaacttaacctatcaaatatcttcattttaagcagagtcattttattaacgactctgcttttttaatttacttttttaatgctattgccacaatttgttcatagatttatattaattttatgtcttaaacattcaattctgtttctataagtgatactctattattattcttaaatagaaatgtttactaataaaggagattattgaagtctatgaaaaagagtatgattattagtagttttttagccctgttattaatgttaagtgcgtgtgcacctaataatgataataatgaagacaatcataatcaaagtaacggtgttaatgcaccgaaacatgctaaaaacttaactgaaaatgatatttttacatcgaataaatctcatcaaaagcttactgaagatgaaatgaacaaagcaatcaaaaaatatctagatgttaatagtgatattttagacaataaatatataatgcaaagtaaaatcgatcgtcaaagttcaggacaaacaaaaatcactgataaacaagctaaaaaacttagtcatttatctaatattgctgttaaaaatgacttacactttaaaaaatatgttgaaaataacacattgccagacggctataaagataatgtaaatcgtattattaagtactttcatgctttgaatagtacaattgcaaatgttgatgaaagtatcgaacaactgaattatcaacctcaaaatacaattaacattgtagatgttcctactcattatgctggagatgtaaatggcaaccaacaaaataaaatcaaatctttcttaaataagaaagatatcaaaacaaacgtttttgataaatagaatagggagtatccatttgaatatgttttcccagtccattaatggtgatgtcccatatataaaaaatctgagacgataaatgatgtctcagatttttttataattcaatgagatatggcttacaattttcaattactttaattaatgcttcttctttatttatatagccaaagtaaaccataatacaacgaatcacaacttgatgtgcaataatgactatcgtgtaatcatcttgaatatgaatcgtttcgaaaaactgtttcactctataataaacatcattataactttccccctcaggtgctttttgaataaagctatgtcgaaaatctttataatttggatcatgaaaataacgatgatacatattgtttttcataagtttatccttaaattgaccttcaaatagacccaatgaacgttcacgtaatagtgatgtgactgtagttgggatatcgtaagggaagatatattgatatgtttctttcgttcttgttaaatcagatacatacacatcattaatttttatattataaaaatatgactttaattgttttgcgctttcaacgcccttttcagttaaaggaacgtctaactgaccacaataatatgctcgattgtacttattatcataattagactgtgattcaccatgtcgaataagatataaattcatgttttacctcctatttcaatttattatattaaataataaatgaatgaagtctactaatcatataaatgatatatttttaaataatatacatttttatgattgttattatttatattgcatgatactattaatatgtagttatttaataactacaagtcttttatattcatgaacataatactcctggatgacgccttaacccgacgtcatcctctttttttagtttaataaataaaaaaagagcactacataacgtagtcccctttaaaatactatacctattttttgattgcttttaaaattaaagaaacaataaaaataagaataattgcaccgattaatgctgggaagattggtactccgccccaaacaggcccccaagtacctaacaatttacttccgatgaatgaaccgattaaaccagcaataatattacctaagataccaccagggatatctttacccatgatcatgccagcaatccaaccgattaatccaccaactattatcataataataaagcccatagttagattactccttatagttttattttgtttacttcttaatcataccacctatttaaattttataaacatcattattaaaataatttattttttataacaaaaacaactaaataataactcccacatattttattagtatttattcaattaatgattaaaaatataagactactaaaaaatagcaactatttttatataaaatacttgctaaacattatgaacaactttaaaggaacaaaacatattcatgttgaatataatgtcttgttcctttgtttttattcttcggtatttgtactttgatgatttggttgtgcttgttcattacgatctatttgagaagttgtgggttcttctttagtttgtgtagaagcgtctgttgaagttgaatcattgttctcggattgattcgatgtctggacatcattttgagtttcagattgcgcactattttgattttcttcattagacgatgtatgttgtgtttcattatcattctttgtttcattattttgtacatcattgtttcgttgtcggttactttgttctaatttactttcattcatttgttttcttttagctttttcttcatctgtcatattattataattatcaacaatactacctgtatgtttatctacaatggctacataaggtgttccagtaccatatgcgtcacttgctgcataatctatataatacatctcgtcagtacttttactaggattgtaattaaattcatttcttaaacgatttccaaatccttgatttttataccaatcatagacaacatcctctgcttgcttcggtgtaagttctttattcaaagaatcatttgattgattgtcactagttgaatgactttcattcgtagtcgtttcattatttccattgattccattttcagattggttttgagtattctgttcggatgactgaatactcttattatcattgggttgaatatcttcagtttgattataattagtattttcatcattattattttgctgtgtgtctgatgaatctatatttttatcattattagtatcattatttttatttgaattattaggcgttttatttttatgatcattcttctcagttttttgcttatcctctgaactatcattatttccgcctggtaaatgaatatttaaatcacaagcgcctaaaaataaagtagatgcaacaatacctgctaataaatattttcctctcattatcatcataactccttatgtatgtctcttttaatgataacattttatattgcatacattaaagatattacgcaatacattttaaaatcaacttaaggtgtataatctatccattttttattactacgacataaaaataaccccgtaagccttgagcttacggggtttacactaattatatattagttttcatctttaacatatggtaataaagccatatgacgagcacgtttaatagctgtagtcaacatacgttgatatttagctgaagtaccagttacacgacgtggtaaaattttaccgcgttctgagataaaacgttttaataattcagtgtctttatagtcaatatgtgtaataccatttgctgtgaaatagcatacttttttacgacgacgtccgcctcttcttggtccacctgccatggttaattacctccttttatatttttaatctcattctttcgttagaatggtaagtcatcatcactaatatcaattggaccatttgcatttgcaaatgggttatctgattgattattgtttgatgcacgattattattattattataagatgtattttgtcctgattgtgaaccaccaaatccttggccataatcttggaaatcattatttccttgatgacgttgtccaccttgtggatttttaggttcaaggaattgaacactatccgctacaacttcagtgacaaatatacgacgaccttcttgattttcataactgcgtgattgtatgcgaccatcaacgccagctaaactaccttttgaaagatagttatttacgttttctgcttgtcttctaaatacaacaacgttaataaagtcagcttcgcgttccccttgagcattcgtgaaagtacggttaactgctagagtaaatgtcgctacacttacgcctgagggagtacttctgtattctggatccttagttaaacgacctactaatacaactcgatttatcatttcaacgcccccatttaattattacttatcttggtcttcacggataacgatataacggataatatcgtcattgattttagctaaacgttggaattcgtctgtagctctgttattatctgttttaatgcgtacgatgaagtagaagccttctttgaaatcttcaatttcgtaagcaagacggcgtttaccccaatctttctcttctaaaacttctgatccttctgaagctaagataccgttaaagcgttcaacaactgcttttttagcatcttcttcaatgttaggacgtacgacatacataatttcatatgttctcattttataattgcacctccttgtggtctatgcggcctatcgaatcctatccataggcaaggaataattttcattactcacaatcaagaattatagcataggtaattactttttacaataaatattatttgaaatattttgtctgaaagtggataagatctatcgtattggcctataaatttatattcaaactttaaacatatcttttcaaaaaagaactgatatcctataatatccttgaggtgtcactatgcaattagatttagattggaataaagattttcaagagtttcaagaaatcttaaattgcggtatcaatccagagtggctatactgtgcaaaagctaatatgattcttgagccagcatatactggagaaggtaaacagttttttagcaccaaagatattattaaagcaagtaaagttataccgtttttttaagatataactataatgatataactaaagcgcgacatctataataaacagatgtcgcgctttttatattcctatacattaaatcggaagtgaacaatatctccatctttcataatataatctttaccttctaaacgttgtttacctgcttctttcgcaccttgctcgccaccatgctcaacatagtcgtcataacttgttacttcggcacgaataaaaccacgttcgaagtctgtatgaatgatacctgcacattgtggtgccgtcatcccttgtctaaatgtccaagcacgtacttcttgaacacctgctgtaaagtaagtagataatcctaacaaatcatatgttgttctgataagacgatcgaggcctggttcttcaatacctaagtcttctaaaaacatttccttgtcttcatcatcaagtgttgcaatttcttcctcaatttttgcactaatgacgataacttcagaatcttctttagctgcgtactcacgaatggttttcactttatcattttcatcgtcaccaatttcatcttcgccaacgtttgcaatatataacatttttttagatgttaataattgagcttgatttacatatttttgatcttcatcattaaaatctaaactacgaactggatttccttcctctaatgcttcttttattctagataaaatgcggaactccatttctgctgttttatctttttgacgtgccattttttcaattcgaggcaaacgtttctctactgattctaaatcagctaaaacaagttccatattaatgacttcaatatcatctaatggatttacacgaccagcgacgtgtgtcacattttcatcatcgaaagcacgtactacctgacaaatagcgtctacttcacgaatatgtgataagaatttatttcctaaaccttcaccttttgaagcacctttaacaatacctgcaatatctgtgaattcgaaagtggtaggaattgttttcttaggttctaccatttctgttaatttatttaaacgtgtatctggtacttctacaatcccgacattcggatcgatcgtagcgaaaggatagttcgcagcgagcgcacctgcttttgtaattgcattaaatagagtagatttaccaacattaggcaaacctacgatacctgctgttaaagccatgaatcattctcctaactttctgtatcttgatgagatactaatattttttttatttttttatcaaacacttgtcgtggaatcataatacttctttgacaattttcacatttaattcgtatatccgcacccatgcgaataattttaaatcgatttgttccacaagcatgttgttttttcatttctactatatcatttataccatattttggtgtcacaacattacccccaacatttattaagcgtcttgtttatcagtatttcttacgtacatgggttgtggcaatttaataccttcttgtacaaacattttttgaatttctttgcgtaaaattctagaacctgaagcaccttctccaggaatagtttctgctgatattcttatgatcacttttgtttcatctaacccatcaattcctaaaacgactggatcagtaatgaataagtagtatttactacgcattgctgtaaataatttatttaatttcttttcaactttatctaaattttcatcaactgagactggaatttctacaattgacgtaccattagtaatagaatagttagtaatctcacccatactaccatttggtaaaatagttaactccccagtgatggtattaatacgcgttgatctcaatcctatagattttacagttccttcagcaactgtagtaccaccgctattaattttaacataatcacctacatcaaactgattttcaaaaataatgaaaaatccagtaataatatctttgactatagtctgggctccaaaaccaacagcgatacctacaacaccggcgctggcgataatcccatttacgctaattccgaacttacttaatactgttgtgagtacgataaaccacacaatgtatcttacaacatttttgataagggacacgagcgttttagagcgttttttattccctctattacttttattttgaaacttaaatgcttcttctatcgctttattaataattccaattacgattaaacctactaaaatataaataataatcattgctaatttagttgctaaatttgtatatacttcgggttctgttaatggttgaaatagcgatgttaacacgtgcttcaactgattcatataaccccctccttttctatttagtccaccttaaatttatatttcaatttatttattatacaaaaattcttctaaaattgtatccgtcttttgatttatcattttctttttttattttattaataggatactattcattaagcttatctataatacgtttaaactcagcctcggatttaaactcaaacacaattttcccaacatttttagatacagatatatctatatgagttccaaatttttctttaagcgcacgttcttgtttctgtatgaatttgggtttacttggagtatttactttttcttttttagactgcctaccgtcttggatttcagaaacaactttttctaaataacgtacactccacccctctttgattgcttgtttacctatacgtttcatcgtatttacatcttttaatgcaagtaaagtacgtccatgggcacctgacatgcgattctctcttacaagcttagcaatatcagagggtaaatttagtaatcttagcatattagcaatgtaaggtcgtgattttcctaacctttcagcaactttttgttgtgtcagaccaagatcattcattaatcgttgataactttcagcttcttcaattgcatttaaatcttctctttgtaaattttctataatggctaattccatcatgtcagaatcagaaagggattttacaattgcaggaacttcctctaacccagctaatttagaagctcgaaaacgtcgttctcctacaacaatataatatccattgatcgtttttcttaaaacaataggttgaagtataccatgagttgttatagactctgctaaatcttgaagtttctcctcatcaaatgtttttctaggttgatagggattagctttaatacttgaaattttaatatgttgtacgtgttcatcattatttaattgaacacgttgatcttcaatgttgttcatgcatagtcctcccttgtctttaaagtcattacttaattttaaaaaaagcgtgttatatctacaagtcttataaacttttttaagaaaaaaatttactagatagaaagtatatatatcaatcattcaggcactttctgaatttattatttaatcataattttcagaaaagttgttgacaaatgtaatttatgtctgtaagctatgaattaacttaaaaaaacacaaattacacacggtaataaggaaagtaaaacttacactgcagatacagagagtcttgtaagctgagaagagacattgaaagaaagtttgaaaatggcctttgagtgttgatgccaatatgaggtatcaacgggttcgcccgttatagcgatacagtattaacatttattgtttaatggcgtactggaatcatcgacgtcactaaattatcgttaatactcatttatcttcaaaagttaaatgagttttttattacagatatatctgatcatttacgataatgtgtgccactttttcaagtactcctaaaacataatggcgtactgtttgaggttactttagcaataaagtagtaaacaaaggtggtaccacgaaacaagctttcgtcctttacatccgatacatatcgggtttaaaggatggaagctttttttatttagaaaatgataggaggatttgaaatgaaagatactcaattagcacaaatttcattaacaaaggatttgactggcgcaattgctaatcccatttacttatcgacggcatatcaacatcctcacctaggtcagtctacaggatatgattacacacgaacgaaaaatccaactcgctcttcatttgaagaagcatttgccaaattagaaggtggtacagtttcatttgcaacgtcaagtggtatggcagcagttcaacttatttgtaacttatttaaacctggtgatgaaattttagtagcgtttgatttatatggaggaacatttagattatttgattattatgaacaacaatacggtattcattttaaatacgttgattttttaaattatgaagaagtcgaaaatagtataaataaacatacaaaagcactctttatcgaaccaatttcgaatcctcaaatgattcaaattgatgtagaaccctattatattctgagtaaaaaacatcatctattaaccattattgataacacgtttttaactccatacttatcaacacctttagaacaaggtgctgacattgttttacactcagctacaaaatatataggtggtcataatgatgtacttgcaggcgtagtgacagttaaagatgacacacttgctgaacaattaggtcaatttcacaatatgattggcgccacattgtctccacttgattgttacttgctccaaagaggtttgaaaacactacatctcagaatagaacgatctcaagacaatgcacgtcgtctcgcaagacgttgtgaaacatccgattctattgatgaagtactctatagtggaaaaacaggtatgttaagtttacgtcttaataaggcttatagcgtagctaaatttttagaaaatttagaaatttgtatttttgcagaaagtttaggaggaactgaaacctttattactttcccatatacacaaacacacgtcgacatgccagatgatgaaaaagacaaacgaggtattgatgaacatttaattcgcttatccattggtattgaagattataaggatattgaagcagatattattcaagcattagaaaattctaaagtaggagtgatttcatgagcttatctaaagaaacagaagtgatatttgatgaacatagaggtgtagattacgattcagcaaacccaccattatatgattcttcaactttccatcaaaaagtacttggtggtaacgcaaaatttgattatgccagaagtggtaatcctaatcgtcaattattagaagaaaaattagctaaacttgaaggcggtcaatatggatttgcttatgcttcaggtattgcagcaatatcagctgtattactcacattacaagctgaagatcatgtcattttaccagatgatgtgtatggtggaacatttagactaactgaacgtattttaaatcgttttaatattaaatttacgacggtaaatgcgactcatcctgaagaaattgaacaggccattcaacctaatacaaaattaatttatatagaaacaccatcaaatccatgctttaaaatcactgatattaaagcagttgctcatatcgctaaaaaacatgatttacttttagcagtagataatacatttatgactccattaggtcaatctccacttgcacttggtgctgatatagtggttcattctgcaacaaaattcttaggtggacatagtgatattattgctggcgctgctattacaaatcgtaaagacgtcgctgaggcactttacctactccaaaatggaacaggaactgccctatctgcacatgatagttggactttagccaaacatttaaaaacattacctgttcgttttagacaatctacattgaatgctgaaaagcttgtaaacttcttaagtcaaagagatgaagttgctgaagtgtattatccgggaaataatgatttacatttatcacaagctaaaagtggcggtgcagtcattggctttcgtctaaaagatgaaacaaaagctcaagcctttgtagatgcgctaactttaccacttgtatcggtaagtttaggaggagtagaaacgattctctcacatccagccacaatgtctcatgcagctgttccagaagaagtgagaaacgaacgtggcattacatttggcctattccgtctaagcgtaggtcttgaacaacctgaagaactcatagctgatattgactacgcattgaaggaggcatttaatgagtcgattattgaatcatttgaagaacaacgttttagtagctgatggcgcaatgggaacaatcctctattccgagggcctagatacttgtcctgaagcatataatcttacacatcccaataaagttgaacgtattcatcgttcatatatagaagcaggagctgatgtcattcagacaaatacgtatggcgctaactttgaaaaattaaaagtatttggcttagagcataaagtaaaagaaattcataaagccgctgtagaaattgcaaaacgcgcagccaataaagagacatttatcttaggaacggtgggtggcttcaggggaataaaacaagaagacttatcgctttctactattcaatatcatacagacaatcaaattgatactttaattgaagaaggtgtagatggtttactatttgaaacctactacgatttagatgaattaacgagtgtgataacagcgacacgtcaaaagtacgatattccaattatcgcacaactgaccgcttccaatacgaattatctcgttgacggtacagaaattaacgaggcgttaaaacatctcattgaatgtggcgcaaatgtggtgggcttaaattgtcaccatggcccacatcacatgcaacgctcattttcacatatcgaactaccagaacatgcctatctctcatgttatcctaatgcgagcctactcgatattgaaaatagtgaatttaaatatagcgacaatgctaaatattttggtgatgttgcacaagaattaattaacgaaggcgttcgtttaattggtggttgttgtggtactacaccggaacatatctcttacattaaagaatctgtaaaaaatttaaaaccgattaaaaataaaaaagttattccaattcatcgaacaattaatacaaatgcaaaacgtacattaaaacaaaatttaacatcaaaagtaaaacagagacctactgtgattgttgaattagacactccaaaacatcttgatacagaattgttctttgagaatataggtaagctagatgaagcaaatattgatgcagtaacactcgcagataactctctcgctactgtaagaatcagcaatatcgctgctgcaagtttaatcaaacaacaatatgatattgaacctcttgttcatatcacatgtcgagatcggaatctaattggtttacaatctcatctacttggcctttcactcatcggtgttagtgaaattttagccattacaggagacccttcaaaagtaggtcatctaccaggcgcaacaaatgtttatgacgttaactcaaaaggtctaacagaacttgcactacgatttaatcaaggtattaatgttgatggtgatgcgctgaagaaacataccaactttaacatcgccggggcgttcgatccaaacgttcgtaaattagacggagcagttaaacgccttgagaaaaaagtagcggcaggcatgagttactttattacccaacctgtatatagtaaagaaaaaatcaaagaagtatatgaagcaactaaacatcttgatatcccactttttatcggtatcatgcctattgcaagctacaataacgcacttttcttacataacgaagtgcctggaattaaaatgtctgaagatgtattaaatcaatttaaagcagtaaaagatgataaagaaaaaacaaaagaattaagtttgagactgtctaaagaattaatcgatacggtacatgaatactttaatggtttatatctcattacacctttccaacgtattgattattcattagagctcgcagcatattctaaagcaattacccaaaacaaggaggcaatatcatgacaacaattaaaacttcaaacttaggattcccaagattaggtagaaaaagagaatggaaaaaagcaatcgaaagctattgggctaaaaaaatcgataaaactgaattagatcaaacattaacagacttacataaagaaaatttattacttcaaaagaattataatttagacagtgtacctgttggtgatttctcattatatgaccatattcttgatacatcattacttttcaacattattcctgaacgtttccaaggacgtacagtagatgatgatttattgtttgatattgcacgtggtaataaagaacatgttgcaagtgcattaattaaatggtttaacacaaactatcactatattgttcctgaatgggataatgttgaacctaaggtgaatcgcaatatattattagaccgttttaactatgctaattcaattaatgtaaatgcacatcctgtcattgttggcccaatcacttttgtgaaactttctaaaggcggtagtcagtcttttgaagagaaagttcaaacattacttccattatataaagaagtattacaatctttagtagatgcaggtgctgaatacattcaagtcgatgaacctgttctcgtcacagatgaaagtgaaaattatgaaaatattactaaagaggcttatgactactttgctgatgctgatctaggagaaaaattagtcatacaaacctattttgaacgcgtgaatgtcaaattcttaagccgtttaccagtggctggtcttggtttagattttgttcatgatcatggttataacttagaacaaattaaaacaggagatttcgataaatctaaaacattatatgctggtattattgacggtcgtaatgtttgggctgcagatattgaagcgaaaaaagaattaatcgaaactttacaaccttatgctaaagcaattgtaattcaaccatcatcttcattattacacgttccggtatcattagatgatgaaacattagatacatcaattgaagaaggcttaagctttgctactgaaaaattagatgagttagatgcattacgtcgattatttaataataatgatagtaaaaaatatgatgagttaaaagcacgctatgaacgattccaaagtcaatcattcaaaaaccttgaatatgattttgatagcgtaccaaccagtcgtaaatctgcttttaaagatcgtaaaaaagcacaagacgctcgtttacatttaccagatttaccaacaacaacgattggctcattccctcaaacaagagaagtacgtaaataccgtgcagactggaaaaataatcgaatttcagacgaaaaatataacaacttcttagaaaatgaaatcgcacgttggattaaaatccaagaagagattggcttagatgtacttgtacacggtgaattcgaacgtaatgacatggttgaattcttcggtgaaaaacttcaaggtttcttagtcacaaaatttggatgggttcaatcttatggttcacgtgctgtaaaaccaccagttatttatggagatgtaaaatggactgcacctttaacagttaaagaaactgtttatgcacaaagcttaactgataaacctgttaaaggtatgttaactggtccagtcactatcttaaactggtcattcgaacgtgtagacgttcctcgtaaagtcgttcaagatcaaattgccttagctattgacgaagaagtattagcacttgaagaagcaggtattagagtcattcaagtagatgaaccagcattacgtgaaggcttaccattacgttctgaataccatgaacaataccttgctgatgcggtaaattcatttaaacttgcaacctcttcagtccaagatgaaacacaaattcatacgcatatgtgttattctcaatttggtcaaatcatccatgcaattcatgacttagatgcagatgttatttcaattgaaacatcacgtagccatggtgatttaatcaaagactttgaagatattaactatgatttaggtattggattaggtgtatatgatattcatagtccacgtatccctactgaagaagaaattgcaacagcaattgatcgttctttacaacaaatcgaccgttctttattctgggttaaccctgactgtggtctaaaaacacgtaaagaagacgaagtgaaagatgccttaacagtacttgtaaatactgttcgtaaaaaacgtgaagaaaaaaataaacctgtcgcataagatacagataaacatgtgagggagaaattgagttttctccctcttttattcttatattagactttcgaggtgaaacatatgacaaattatccattgtgggaccaattacaacaattaaaaacagcagagtgggtagatttaacccatactttcgatccagacattccacgatttagtgaatttgaaaaaggccaagtatccacgttatttacagtcaaagaacatggcttttatgtacaacgttggaatatcgttacacaatacggcacacacattgacgcaccgatacattttgtagagaataaacgttatcttgaggatcttgatttaaaagaattagtcttaccacttatcgtgttagattattcaaaagaagtaaaaaataatgatgactttatcgtgacacgccaacatttagaacagtgggaagcggagaatgggcgcattgaagaaggtacctttgttgctttacgtacagattggtcaaaacgttggccagatattgaacaattcgaaaatagagatactgatggtaaccaacatttaccaggttggggactagatgctttaaaattcttaattgaagaacgcggtgtaaaatcgattggtcatgaaacattcgatacagatgcgtcagtagatacagctaaaaatggcgatattgttggagaacgttatatacttggacaagataccttccaactcgaactcttaacaaacctagaccaattgcctacgcgcggcgcagtcatttatgcaattagtcccaaaccaaaagatgcgccaggtttccctgtccgtgcatttgctatcaaaccatcttaaatataagtgatatgttgataatgagcgatcaaatttatcactttcctatataatatataacatcctgatactaaagtacttgagcaagacgaagtatcaggatgtattattatttatattcattttcatattcttctctcaacaaactatacacataactatctgagaattacccttgtacacgttcatcacttctcaatataccttcttgtgtgaatccaagtcttattggtatagctcggcttttcttatttttagtagacatttgtatttcgattcgattaatatcatattcttcatatatatattgaataagtgctttagtgcatctagtcatgatacctttcttttgaaaatcttcagctaaataataaccaatcgaggtacgtttattaactaagtctaaataatgtaatccaataacaccaatcagttctttatcactccatattccacaatgaaatccattaccatcgataaattgttgtaaagctgaatggataaagtgtttactatcttccaccctctttgtatgttcgacaaaaggtaaaaattccgctagatatttgcggttactatctactaatttaaataactgctctgcttctcgttcttctaatatctttattttaatatctttatctatttgataaccaaagatcataactatcccacccgcttatataattattaatgaaccaaaaagaaaaaaacgctactaaagaggatatggaaatccatctccacgagcaaattgctgtaacactaaatggataaagtgtttactatcttccatcttcttcgtatattcaacgaatggtagaaattctgctaagtagtcacgatttgaatccacgagcgtaaataattgttccgcttctcgttcctctaatattttcagtttaatatctttatatatttgataaataaaaatatacagtactttatttcttttttcaaaatattcaataaattatacacatattaatatgttaagtttgctaaaaaatatgaatttattaaatatttttaaaattttatattgctctttattcgatatatgttaaccttttatacatctgttttattaaatttgaaaggagttaaatacatggaaaacaaatctaaacagttttcaaatgtgtttatttttgcttcagttattgtagggttactggtaattattggagccatcttccctaatcaatttggttcaatttctggagcaatcggaagttttattacagaaacgtttggttggtactatatgctacttattagcattattctgatattttgtatcacacttatttttcatccaattggaaagcttaagttaggaaaacctgatgataaaccagaatttaataccatttcatggttaacaatgctatttagtgcaggtatgggtattggacttgtattctatggatcttctgagcccatttcacattatctatcgccaccaacagcgaataaagaaacagaagctgctctagctgaagccatgcgttcaagtttcttacattatggactacatccttgggcagtttacggtattgttgcattggctcttgcatatacacagtttagaaaaaatgacttaggactcatttctcgtacattacgtcctattttcggaaataaagtagaaggtccattaggtactgttgtagatgttttagccgtgtttgctactattattggggttgcagtgtcacttggtgttggcgccatgcaaattaacggtggtttaaattatttatttggagtgccaaacaataaacttattcaaggcattattattcttattgttacagttttattcttaattagtgcttggagtggcttaagcaaaggtattcagtatttaagtaatttaaatatgcttttagctgcgatgttatttattattattcttattgtaggccctacaattttaattatgaatatgtttacatcctcaattggtgaatatttgaatactcttatttttaatagctttgatgttgctccacttaactcacaaaaacatgaatggttacagtcatggacgatttattattggggctggtggatgagttggtcaccatttgtaggtatcttcattgcacgtatttcaaaaggtcgttcgatccgtgaattcgttatagcagtattaggtgttcctacaattattagtatgctatggtttacagcatttggtattactggtattgaaattggtaagcaatctaaacatatctttagtatgccacctgaaacacaattatttggtattttcaatgagatgcctatgggtacaattttatcgtttatcgctattatcttagtaggctcattctttattacatccgcagactcagctacatttgtattaggcatgcaaacatcatttggtcgtttaaatccatccggttttgttaaaattgtctggggcgtgatgttatcagcgattgcctatgtacttttattatctggtggatcgacaggtctagatgcgctacaatctgctgctattatttcagcattaccatttagttttgttgttattttaatgatgatttcatttttcaaagatgcaaatcaagaaagaaaatacttaggtttaaccttacaacctgatcatcaacgtaaaaaggactatattaaaaataacacaactcaacaatctaaaatcaaataggacagaaactgagacatcattaaatatctcagtttttttattgatagccgatgattgaattgaacatgcatttgtcgcaagcttttttcaaccttagtcctcttttttggggacgacacattcaaaatgaattctatctactcttgtagtttgtataatatatcttctaaaactctactataaaataaaaggtcacagcgaattgaagacattcgttgtgactttatttttaaaatgttcctggattgaagttagtcttccattcattaaatggccaatatctccaaacgactttacctacaagttgttttttatctactagacctacaacatcaaatcggctatctatactattttgtctattatctcctaaaactaaatatttatctttaggaagtttcatttcaccatttgaacctttaatttgacttgatttaaatgagcctgttaaatattgaccttgtttgtgtttcttattgtaatctaaatacggttcagacacttttttattatttacatataattggtctcccttatattctactgtatcccctggtgtaccaatcacacgtttaataaaatcacgttttgaatcttcatgaaatacaacgacatcaccattatcaatgtgattcatagatttagaaattttacttataatcactttattgcgatcttgaaacgttggatacatcgaagacccagatactgtataggattcgccaataaactttgttactacaataacaaccagtagtcccactacaatggatataacccactccatgatttctcttttcacatttcatcccgcctatcatttgttttattctcgatggcttctactctatcatacatacttttcaaacacgtttcattcttcttacgattgatttctatttgaatctttcacattcgtaagatatccctcttactttgtaaggttagataaaggcaccgcttcattcactcttttaaaataagaagtgtaatagatataaggagtgatgagattgaaattattattaagaatcatattaactattcttgtcattattgtagtcattataggtggtttatttggattaaatgcatattcagaccaacatcctaacaatcgttctatcaatgattggaataaattaaatcccttagcaccaacgcatgagtattatgttaagactcaaaaaccatcaaaagtggaagtcattgataaggaaaaagacttctacatctaccattacaatcaaacaggttacaccaaagatggtaaagctaaaaacattgattacacagcgtctaaaaaattaaaacaacatcattacttagttgtaagcgaaaaatctcacaccattacatcatataaagaagtaaaacactcagacattccaactaaagcgaaagaaaaattataaaacttacaaggagtatgagaatcatgcctattttaaacgttaatcatgtatcaaaaatttatggaacgaaacaaaaatttaaagcactacacgatattaatttttcagtcgataaaggagaattcgttgccattatgggcccatctggttcaggtaagacaacccttcttaatgttatcagttcaattgatagcatttcagacggtactgtagaaatcagtggcaatgagataaaccagttgtctaataaaaaattagcacaatttcgtaagaaagaacttggttttattttccaagattatagcgttttacctacattaacagttaaagaaaatattatgttgccattatctgtccaaaaaatgaaaaaagatgaaatggaaaaaaactatcaagacgtcacagaggcacttggtatttatgatttaagtgataaatatcctagtgaaatttctggaggtcaacaacaacgtacagctgctgcacgtgcttttgtacatcgaccatccatcatttttgcagatgaacccacaggtgcactggattcaaaaagtgcacaagatttacttcatcgcttagaagatatgaacaaacaatttaatagtacgattattatggttactcatgatccttcagcagcaagttttgcacaacgtgtcattatgttaaaagatggcgatattcattcagacattcatcaacaaagtaaaacaaaatctacattttacaatgaaattattcaattacaatcagccctaggcggtgtggcaaatgacgtttaatcaaattacattaaagaatttaaaaagtaatatcaaacattatgtattatatcttttttcattaatcttaagcatcatcttatattttagttttgtcacattacaatacacacatagcttaaataatggttcatcaaaaataatcaatcaaggtgcaaaagttggttcagtttttttattcattacgattatcattttcttaatgtatgcgaaccatctatttattaaacgtcgtacacgtgaatttgcattattcgaactcattggactaacacgtggtaacattcttagaatgcttgctatcgaacaaatcactttatttattagtacaggcattattggcgttatcattggtattttaggttcaaaattattgctttcaatattaataaaactgatgcatttacacattcatgcatctataggatttgaagtagctgctttaattcaaacaatgatcatgctaatgttagcgtttattttaattatgttagaagatgcgatctttttaaaacgaagaaccatactttctatgatgaaagacagtatgaaaacagaagcagtaaaagcgaaaatcaccacgccagaatgtattgctggtattcttggactcataatggtgatgttaggttattatatgtctacagaaatgtttggtaaatttcaagaattaacgatggccttattaacgccatttattattttattcttaactgtagcaggcgcatatttgtttttcagaagttcagtttcaattatttttaaatctttaaaaaaatcaaaacatggtcgtgtctctatcactgatgtcgtctttacatcttcgattatgtatagaatgaagaaaaatgcgatgtctttaactattattacagtcatttcagcagttacagtaacaatattgtgtttcggagcaattagtaaagcaaatgctgactttaatattcaatcatcgtcacctcaagatattaactttactaaagtaaaggtggcccaacaatttgaacatcaacttaaccaacacgatataccctatacaaaaaaaacgtatgaaaatgccaatacccatattattgaaaatgatgtcattaaaagtaaaacgggtaatgcaatgcaaaatgaaagtatatcaattatggctgatcctcatatcgaaggtcatcacgctacaattacaaatttacaaggtccactttcaatgatgtttaatgttcaaattcataaagatttaaaactaaaagggcaacaagtaaagacattttatgtagataaaaaagatttaaatgaaatcattccaatggatgcttcactgggtggaccagtacttaaaattagcgcagacaactataatgctttaaaaacaaaaaatcaacttacacatcattatggttttaatattaagcatcatagcgatctttcaaaagctgaaacattagctaaaaaaggaaaccaaaatgtagttttaaaaagtgaaaccaaaaaagcaattgatgaaagtaatggcattcttatatttgtcacttctttcttaggtcttgcatttttagtggcagctggttgcattatttatattaaacaaatggatgaaactgaagatgaaataaataattatcgtattctgcgacgtattggttttacgaatacagatatgataaaaggactagctttaaagattatattcaatttcggtttaccattagtggtttctttacttcatgccttttttgcagcaaacgcatttatgatcttaataggcaattatacattgacacctatcttcattgtcatgattatctattcactcgtatatctgatatttgcagttatttcgttcattcattcagaacgcatcattaaagacgccatttaaataataaattgaaaggacatgttaaaatgactattaaagaaatgattcaacacgcatatgacgacttagtaagtttaaaagtaaattggtttaatggtatcatgttagctctgatagtattagttattagtagtattacaacgccatttcttggtgtgcccgtaggcttacttggcggtggctatattttgaaaagatacgaaaaaaataaccattagaataaaaaaggaagctcaaaatgaattgagcttctttttcattaatattttaaaaatatctctgttaaatatagactcaaataacacatacataaaaataaacccactacaaaaataaaagataatatactagtaaatatatttcttttttcactagattttacttcgttcggatctttaccattcataaaagctactattctatcgtagttatctaaattgtatttatacttaattttatctatttgagtactactataaaagctaattaaaaaaagaatagcaattattataaaaccccataaattaaaataatataagataggacctataagcatagaagacaaagtaaatccaataatcataactaacgaccaaatgttcatttttctttttatagattcttgtttatttgaatttaaatctcctctaactaaatcatctagtgagatatcaaacaactcacacattactagtaaattatgaatatccggataactcttttcattttcccaatttgatattgtctgtctagaaacatataatttttccgctaagtattcttgagaatattcatctctttctcgatattttcttatttgttgaccgatatccattcattcacctcgttataaattaaactatttttatttgatttttaaaatcataatactacatttataaaagcgttttttctaataaaaatctatcaattttcttttacattatcttagttttagtgtaaaaaatgttttacattttagtatattgcaatatctttggatctttagaacaaatataagcaaagtattggtggtgaaattcctaaatgggtaggacaaattaaagattgagaccttaatcataaataaacattaaaagactttgagttgagatagactgaaactatcccccaggaaagtgaaatcgtataatactgattattaataaaaaaacccatagattaataaaatcatctacgggttatataaaagtaagatttatactctactttcttatagtttcaatatttttactattcaatattatatgcatctaaaattacttttaataactttttaatataagcttcattaaggacgttaggtttaatcaatatattgaaataaatcggtgaaaaaattaaatcaataaataaatcttggtctgcttcgtcaatatatttagaaataatagtcttcaatattttacgattgctatcaaaataacctttcataaatatgtcacgtgcctcagattgttgatgactaattaatatttcaatcacagcacgccctaaatgagtttgataaatattcataattcttattagaaaatgatacaattcatcgtacatcgttttataatcattttcaaaaacgtgaattcgacttacaaacatatcgacaataatagatgatttatctttccaacgtctataaatcgtcgctttagaaacaccagtattttcagaaatttgatctattgtaatctctctaaaataagtcgtttctaataactgatcaatttctttaaatatcttttcattgattgttggatctttcggtcttccagccatcttttctccttcttaaacgtgaaatcaattctaccatttcaaagataattactgcactcataaaccatacaacaaaaccaaccaaaatactaagcaaccactcatgtgtagaatataacattgcccatgttgctaagatactacataatacaccagtcataccaaaaactgcacctctactaacatgtttggcaacgacattcccatgttgcataccagtaataaataaagaaacaagaaatactgcaggtaatgtggcaaaaacgccacctaattccttccaaggtagcataactgaaataatataacttaacataacggctaaaccacccacgagaaatttgataaaagttaatttcattaaaaagtcctccaaatattaagaaatatgtcgtactgcaaaaatagcaattgaaatgactaaccaacaaataaatgcaaacgctgtaccttttttataatctcgtttacttatataaatcgacgtaatcaatactgtaataatgcaagaaataatacctattatagctcctgaactaagatgtatcgacatttgaatcagccgttctcctcgatgatctatggctaaagcaataatagctgctaggtagactgccggcatagtcgcaataatgccacccattttccctcctactttctcagccatcatcgatgcaaaggcaacagcgatacctccaatcacaaaatgaagtatcgcacttgaaattgatattccgaacacatgaaacccttcttaccttaattaataaacgatacgtttcgtttattaatattgtaattctattttcaaactatgtaaatatgaaataaaaaaatcaattatgataaaatatttgacaaaaaaagaacaggatactgaatgtaccattcattctacctgttcttttagtcattaacgtttatatagttttattttaatttcataataatcctcatgatctttatcacgatgctcaacatgaatacccgagttttcaattgcttgaatactcttacccacttcatcacgtgcttgtgttaaatctttagcaaattggaatgtttttgcttttactttttcagggcctaatttttgtttcacacgagcttctgtctgtttgacattcaatttctgagcaataacttgttcaatcaattgttcttgatccgcttcttttaaggataatactgcgcgtgcatggcgttctgtaattttaccttcacgtaatcgtacaattacttttggtgctaatttaagtaagcgtaatttattagcaataaaactttggctttttccaagactttgcgctaactcactttgagtggtctgtccaatttcaagtaactttttataagcttcggcttcttctattgcagataaattttcacgttggatattctcaataagggctactacagcagtttcttcatcattcatatgtcgaataatgacgtctgctttagattgatgcaaggattgtaatgctctaaatcgtcgttcaccagcaataatttcatacatattctcttctataggtcgaacgacaatgggttgtaataacccatgttcttctatcgactcagcaagttctgtaattttacttgaatcaaacacttggcgcggttgataacggttaggtacgatacgctctatttgaatggattccacacttgaatgacgattttcttcaatataatcaacgatgtcttctttattttttaaaccaaatagtttagaaaaaggttttttcattgtccattcactcctcttaaaatcaattttaacatgagtaaccgaaaaattgattaattttctaataaaggagctttattaggcgtaccaggttttctaggatattttttaggtgtttgacggcgcttatccactataatcatttgtcgttcacctgcatcttctggtaaatcaaacgtataagaatcactaaactctccacctaagatgcttataccaaattgtgcttctgctaattcttcttcaccttttgcagactttaatgcaataaactggccgccttttttaactaacggcaaacataactcacttagaacagtaagtcttgccactgcacgtgctgttaccacatcatatgtttctctattgacacctttaccaaatgtttctgctcgatcatgaacaaaacttacttgggttaatccaagttcaactgctaaatgatttaaaaactgaatacgtttatttaatgaatcgacaatggtaactttcaattctggaaaaacaatttttaaaggaatgcttggaaatccagcgccagcccctacatcacaaagtgttaatggctgattaaaatcatagtaaaatccagctgtaatagaatcatagaaatgtttcaagtaaacttcatgctcatcagtaatacttgttaaattcattttttcattccattcaacaagcaaacgataataggtttgaaattgttgttgttgttgatctgttaattcaataccttgctcacttaacgcttttgttaaccattcgatgccactcattaatttttcaccctttgtaatttaccttgttctaaatatacaagtaagatagaaatatctgcaggattaacacctgaaatacgtgatgcttgcgcaatatttaatggtttaacctctgataatttttctcgtgcttcagtggctaaactatccactttactataatctaagtcttctggaattttcttttcttccatacgtttaactttttcaacttgttgtaatgatttattgatataaccttcatatttcgtttgaatttcaacttgttcttctaccgcttctggtaactgatgcgtttcttctaatatctctaaaattgtattatacgtcatttcaggacgacgcaataaatcaatggctaagataccatcttttaagcgagaaccaccgtgagcttcaatcacagattgcgtatgttcattcggtttaatacggatatttgataaacggtcaatttcatcttgaatttgttgacgtttatcattaaaacgtgcataacgttcttcagaaatcatgcctaagtcataaccaatatcagttaaacgtaagtcagcattatcatgacgtaataataagcgatattcagcacgagaagtcaataaacgataaggctcattcgttccttttgttactaaatcatcaattaagacaccaatataagcatctgaacgacttagaattttttcgcctgtacctaatacgttacctgcagcattaatacctgccataatgccttggcctgctgcttcttcataaccagatgtaccattaatttgccctgcagtgtataagtttttaatcattttagtttctaatgttggccataattgtgttggcacaatcgcatcatattcaatcgcgtaacctgcacgcatcatatctgctttttcaagacctggaatagtagccaacatttgacgttgaacatgttcaggaagactggttgataagccttgcacataaacttcattcgtattacgtccttctggttctaagaaaagttgatgacgtggtttgtcgttaaaacgtacaaatttatcttcaatagatggacaataacgtggacctgtacctttaatcatacctgaatacatggctgataaatgtaaattatcatcaataactttatgtgtacgatcatttgtatacgtgagccaacaaggtagttggtctaaaatgtattcggtagtttcaaaactaaacgcacgaccaacgtcatcgccaggttgaatctcagttttagaataatcgatggttttagaattcacacgtggcggtgtacctgttttaaaacgcacaacttcaaacccaagttctcttaaattatcagctaatgaaatagatggaagttgatggtttggaccacttgaatatttcatattccctaaaatgatttctccacgtaagaatgtacctgtcgtgatgactacagctttcgcatgatactctgtacctatgttcgtacgtacacctttaacttcctcattttcaatcaataattcgtctaccatgccttgcatgatatctaagttatcttcatcttcaatgacacgtttcatttcttgttgataaagcactttatcagcttgagcacgtaatgcacgaactgctggacctttaccagtattaagcatacgcatttgaatgtgtgttttatcaatggctttagccatttggccacctaatgcgtcgatttcacgtactactattccttttgctgggccaccgactgatgggttacatggcataaaggcgatattatctaaattaatggttaacattaacgttttagcaccacgtcttgctgaagctaatcccgcttcaattccagcgtgaccggcaccaataacaattacgtcatattcttgaaccattgaattgacctccctattttttcttaattattattattcattttagactactgatcgtcttaatttttattatttacctaaacagaattgactaaatagctgattaattaattcatcacttgctgattctccaataatttctcctaataattcccatgtacgcgttaaatcaatttgaaccatatccataggaataccagcttcagctgcatcaatagcatcttgaattgtttgtcttgcttgttttaaaagtgagatatgtcttgaatttgaaacataagtcatatcttgattttgtacttctccaccaaagaacaaatctctgatttgtaattctaattcgtcgacaccttcttgttttaacattgatgtttgaataagtggtgtgtcccctatcatagttttaacttcttcaatatctaatcgacgctctaaatctgttttattaacgataacaatcgaatcttcattttttatgacttcatataatgtacgatcttcttcagttaaaggctcgttgttatttaatacaaaaaggattaaatctgcttcacttaatgctttacgtgagcgctctacgcctattttttctacaatattttcagtatcacgaatacctgctgtatcaacaagtcttaacgggacaccacgtacattaacgtattcttctaatacatctcgagttgttccagctacttcagtgacaatggctttgttatcttgaataagattatttagcattgaagatttacctacattcggtttaccgacaatcactgtagataatccttctctcataatcttaccttgagtacccgtttctaataattgatcaatttcatttttaatttttttagactgcgcaagtaaaaattccgttgttgcatcttcaacatcatcatattctggataatcaatgttcacttcaacttgggcaagaatttccaatatcgattgacgttgtcgtttaattaaatcactcaaacgaccttcaatttgattcattgctactttagaggctctatccgttttagaacgaatgaagtccatgactgcttctgcttgagataagtcaattcgaccatttaaaaatgcacgcttagtatattcgccgggttccgccattctagcgccatgtgtcatggtaagttctagtatacgattaattgtcaaaatacccccatgacaattaatttcaataatatcttcacgtgtaaaggtctttggtgcacgtaaaactgaaatcatcacttcttctacaacttcatctgtctcaggatctataatatggccgtaattaatagtgtgtgagggaacatcttttaattttttctttcctttatataacttatctcctatttcaaccgcttctggaccagacaaccgtacaataccaattgcaccttctcccattggagttgaaatacttgtaattgtatcaaaatccattatccattctcgcctccctagttaagtaaaatttcaatataatattgtaataagtttctaattaaattgcgaatatattgttttataatctactggttagtcttcggtttgtctaacattagacttccgttagtctaaatttatttaattctcttattaaatacctttgctattttcaatacatgttctaaactgccttgaatctctaaagttgacatgtttttagcaggttgtctcgctattacaataatatcttttgaaatcatatcttgcttatgcactttaaaattttctctaatggcacgcttaatacgatttcgagttacagcatttccgattttcttagaaacgctaatgcctaaacgaaaatgttcatactcattctttagtgtataaacaacaaattgtctattggctacagattttccctttttatagattttttggaaatcactgttcctttttatacgataagctttctccatgcttaaatcactcgcttacattgttctttatgttacatttatctattaaaatgcgttggtttaaaacgaaaaaaaagaccactgagaagtcagtgatcttatgctgataaaactttacggcctttacgacgacgacgcgctaaaactttacggccatttttagtgctcatacgttttctgaaaccatgaactttactatgtttacgtttatttggttgataagtacgttttaccatgcaaaacacctccatctacatattatatcgcgttcactaaatctacttctaatgaacctgactattttaatagataaatgataattgttaatatcaaataattttgatttaattcgattttatctagtcagaattcaagcaactactacaatataacaaattaccatttataaagcaagcagcttttgaaatcaattaatgattttcaagacgctctcttagttatatcattttcatttttaatatttatacatttcattgatttagtagtttctcaattttatacatatttaatacacgtttataaattatttcccaaacctgttatagtacattgaattatggtatcattttttatccacttattcacatatagtatttaattttttgtggataatcaatagcatattcacagatttataccaaatttacaaacatattcacagccatttgacatctattgcagttaaaaagtataattgtgtggataagtcgtctgaatcatttatcttataggatttttttataaattctatatgtgtttttactgtgtataaatcatagcatatataaagttatccaccgaatgtgattaacttgtggataattattaacatgctgtgattatttttatccacgcttataaaaactgtgtataagtcttaaatttatagaaagatggagtttatatatgtcggaacaagaaatttggaaaaaggtattagaagtagctgagtcagagatttcgaaaacaacgtttaatacgtttttaaaagacactgaacttaaagaaattcgcgacaatgttgcttacatctttgttattcatgagttttacgctgattggttaaactcaaattataaagatgtaattcaaacaattatgaaagacatcattggttatgaagttgatccaaaattttacactgctgaacaacttgctgaacttgacgaaacgagtcgtaaacaatcaaatactgtaaaaaaaacgtctgccattgatgatagtcatgatgatatggatcaatttaatacgcataatacgtttgatacatttgtgattgggcctggcaaccgcttcccacatgcagcaagcttagctgtagctgaagcacctgcacaagcttataatccattatttatctatggcggcgtaggattagggaaaacgcatttaatgcatgccattggtcatcacgtactaagtaataaaccgaatgccaaagtgctgtatacttcaagcgaaaagtttacaaatgattttattaaatccattcgtaacaatgaacctgaagcatttagagaaaaatatagaaatatcgatgtattattaattgatgatattcaattcattcaaaataaagaacaaacacaagaagaatttttccatacatttaatgaattgcatcaaaataaaaagcaaattgttatttcaagtgatcgtccgcctaaagaaatagcaaaacttgaagatcgcttacgttctcgatttgaatggggtctcattgttgatatcacaccgccagattatgaaacacgcatggccatcttgcagaaaaaaatcgaagaagagaacttagaaattccagcagaagcattgaattatattgcaaatcaaattcaatcaaatattcgtgaacttgaaggagctttaacacgtttacttgcttattcaaaattacaaggtaaaccgattacaacagaacttgctgctgaagcattaaaagatattattcaagttcctaaatctaaaaaaatctcgattcaagatattcaaaaagtagttggacattattacaatgtacgcatcgaagattttagcgctaagaaaagaacaaagtcgattgcctatccaagacaaatcgcaatgtatctgtctagagaattaactgatttttcattaccaaaaattggtgaggaatttggaggacgcgatcatactacagtgattcacgcacacgaaaaaatttcgaatgatattaaggcggattcaatttttaagcaagaagttgaagatttagaaaaggaaatacgtaaacagtaataggaaatatgaatctgttgtataacagtgttgctaaaatataacattcaatatcaaagatgactatgcttctaaataattttataaatatagcaaggagttagaaaatgttaaattgtggataatgtgaaaaattaatacacatcattaacaacttatccacatgtgcataactttgatataaaaggtgtttcgttagatatccactaatccacaagccctactactattactatgattttaaaacctatataatttaagtataaacgactggaaggagtttaaattaataatggaatttacaataaaaagagattactttattacgcaattgaatgacacattaaaagcaatctcaccaagaacaactttaccaattttaacaggtatcaaaattgatgctaaagataataacgttattttaactggttctgactcagaaatttcaattgaaatcacgattcctaaacaagtagatggagaagatattgttgacattactgaaacgggatcagtggttcttcctggtcgtttctttgtcgacatcattaaaaaattaccaggcaaagatgttaaattatcaacaaatgaacagttccaaacgcttatcacatcaggacattcagaatttaatttaagtggtttagatcctgaacaatatccattgttaccacaagtatcacgtgatgatgccattcaattatctgtaaaagtacttaaaaacatcattgcgcaaacaaactttgcagtgtccacctcagaaacacgcccagttttaactggtgtgaactggcttatacaagataatgaattaatatgcactgctactgattcacatcgtttggctgtaagaaaattaaatcttgaagatgaatcggaaaacaaaaatgttattatcccaggtaaagcattatctgaattaaataaaattatgagtgataatgatgaagacatcgatatcttctttgcctctaatcaagtattgttcaaggtcggtaacgtgaactttatttcacgtttattagaaggtcactatcctgatacaacacgtcttttccctgaaaactatgaaataaaattaggattagataacggtgaattctatcatgcgatagatcgtgcgtcattacttgcacgtgaaggtggaaataacgtaattaaattaagtactggaaatgaggttatagaattatcatctacatcaccagaaatcggtacagtaaaagaagaagttacagcaactgatgttgaaggtggcaatttgaaaatttcattcaactcaaaatatatgatggacgcattaaaagcaattgataatgaggaagttgaagtagaattctttggtacgatgaaaccatttatcttaaaaccaaaagcagatgattcagtcactcaactcattttaccaatcagaacatattagtgattaaagagtaattaaaaagttaaagtagaatagagttcttattgaattactgttctacttttttattgattaaaacagtcattttaaactatctcagaagttcatagtgaagctaaattaagtaaaacgtggtttttatccacaactcattatattcgctaaaataggccttaaaattaaaaattgagatattatctttgattatttttgtcataatttcaaaaaatgatctattttttacataacaatttaaaatgataaaacttattcgaaagtaaacggtttcatacttcattttaaatgaaatttattcctaaaaaaggtataatatagtaatgatatataaagaaatggagtgattattttggttcaagaagtaatagttgaaggcgagattacgttaggtcaatttcttaaaacagaagggatcattgaatcaggtggacaagcaaaatggttcctacaagattacgacgttttattaaatggcgaacgtgaaacacgtcgtggaaaaaagctagctgaccaagatcgtatcgacttccctgatattccagatatcgattcatttattattattcatcaaggtgagcaatgaaacttaaaacactccaattagaaaactatcgtaactatgaagcggttacgttaaattgtcatcctgaagtgaatattcttattggagaaaatgcacagggaaagactaatttacttgaatcaatttacgtccttgctttagctaaaagtcaccgaacctccaatgacaaggaacttatacggtttaactctgagtatgctaaaatagagggtgagctaagttatagacatggaaccatgccattaacgatgtatataactaaaaaaggtaaacaagttaaagtgaaccacttggaacaaagtcgactcacacagtatgttggacatctaaacgtggttctttttgcacctgaagacttaaatattgttaaaggttctcctcaaattagaagacgatttatagatatggaattagggcaaatttcggcagtatatctcaacgatttagctcaatatcaacgtattctcaaacaaaaaaataattatcttaagcagttacaacttggtcaaaaaacagataaaacgatgctagaagttttaaatcaacaatttgcacaatacgcacttaatgtcactttaagacgtgagcaatttattgaagaattagaggctttagcacaacctatccacgctggtattacaaaccaacgtgaaacattatctttaacatatttaccaagtattaaacttagcgatacaagtaaaaataagagtgaattattagatgaagtcatcacgttattgaatgaatatcaacaacgtgaaatggatagagcaatatgtttatacggtccacatagagatgacttaggatttaatgtgaatgacatggatgcccaaacttatggatctcaaggtcaacaaagaacaaccgctttatcaattaaactagcagaaatagaattaatgaacattgaagtcggagaatatccgattttattattagatgatgtcttaagtgaacttgatgattctcgtcagacgcatttactcagtacaattcaacataaagtacaaacattcgtaacaactacatcggtagacggtattgatcatgaaatcatgaataatgcgaaactttaccgaattaatcaaggtgaaattattaagtaatagaaagtgatggtggatacattgtcagatgtaaacaacacagataattatggtgctggacaaatacaggtattagaaggacttgaagcggtacgtaaacgccctggtatgtatattggttcaacttcagaaagaggtttgcatcatttggtatgggaaatcgttgataatagtattgacgaagcgctagctggatatgcgaaccaaattgaagtagtgattgagaatgacaactggattaaagtgactgacaatggtcgtggtattcctgtcgatattcaagaaaaaatgggacgtcccgcagtagaagttattcttactgtgcttcatgccggaggtaaattcggtggtggcggatacaaagtatctggcggactacatggtgtaggttcatctgtagtaaatgcgttatcacaagatttagaagtgtatgtacaccgtaatgaaacaatttatcatcaagcatacaaaaaaggcttgcctcaatttgatcttaaagaagtaggtagtacggataaaacaggtacagtgattcgctttaaagcagatagtgaaatcttttcagaaacaacagtttataattatgaaacacttcaaaaacgtattagagaattagcattcttaaataaaggtatttcaattacactaagagacgaacgtcaagatgaagaaccacgtgaagacacgtatcattatgaaggtggtattaaatcttacgttgaattactgaacgaaaataaagaacctattcatgacgaacctatttatattcatcagtcaaaagaggatatcgaagtagaaattgcaatacaatacaatagcggttatgctacaaacttattatcctatgcgaataatatccacacatatgaaggtggtacacatgaagatggctttaaacgtgcacttacacgtgtcttaaacagttatggaactcaaagtaagattattaaagatgataaagaacgtctttcaggtgaagatacacgtgaaggtttaacagcagtcgtctctgtaaaacatggtaatccacaattcgaaggtcaaacgaagacgaaattaggtaactctgaagtacgtcaaatcgttgatcgattattttcagaacactttgaacgctttttatatgagaatccaaatgttgcaagagtcattgttgaaaaaggaattatggcgtcaagagcacgtgtagcagctaaaaaagcgcgtgaagtgacacgacgtaaatcagcattagaaatttcaagtttacctggtaaactagcagactgttcaagtaaaaatcctgacgaaagtgaaatcttcttagttgagggtgactctgccggggggtctacaaaagaaggtcgtgactcaaaaacacaagctattttaccattgagaggtaaaatattaaatgtggaaaaagcacgtttagatcgtattttaaataacaatgaaatccgtcaaatgattacggcatttggtacaggcataggtggcgagtttgatatttctaaagctcgttatcataagattgttatcatgacagatgctgatgtagatggtgcgcatattcgtacattattacttacattcttctacagatttatgcgtccattaattgaggctgggtatgtatacattgctcaaccaccattgtataagctaacacaaggtaaacaaaaatattacgtctttaacgatcgtgaattagataaattaaaagctgaactaaatcctactccaaaatggcaaatttctcgttacaaaggtttaggtgaaatgaatgccgatcaattgtgggaaacaacaatgaaccctgaaaatcgtatgatgttacaagtaaaacttgaagatgcagtagaagcggatcaaacatttgaaatgttaatgggtgacgttgttgaaaatcgtagacaatttatcgaagataatgcagtttatgctaatttagatttctaatttaacttaatgtgaactgactataaaaggaggatatcttgatggctgattctctaccacaatcaagaattaatgaaagaaatataaccaatgaaatgcgcgaatcatttttagactatgcgatgagcgttatcgtttcacgtgcattaccagatatacgtgatggtttaaaacctgtacatcgtcgtattttatatggtctaaatgaacaaggaatgactccagacaaaccttataaaaaatcagcacgtattgttggggacgttatggggaaatatcatccacacggcgactcttcaatttacgatgctatggtaagaatggcacaaacctttagctatcgttatcctcttgttgatggtcaaggtaactttggttcaatggatggtgacggtgctgcggcaatgcgttataccgaagcaaaaatgaccaaaatcacattagaactgttacgtgatatcaataaagatactattgatttcttagataactatgatggtacagaaagagagcccgaagtcttaccttctcgtttccctaaccttttagtgaatggcgcttcaggtattgcagttggtatggctacaaatattccgccacataatttaacagaagtcattgacggagtcttacgtttaagtcaaaatcctgatgtcacaatctcagaattgatggaagacattcaaggtcctgattttccaacttctggcttaattttaggtaaaagtggcattagacgtgcctatgaaactggtcgtggatcgattcaaatgcgagcacgtgcatcaatagaagaacgtggcggtggccgtcagcgtattgttgtgactgaaattccatatcaagtgaataaagcaagaatgattgagaaaattgcagaattagcgcgtgagaaaagaattgaaggtatcacagatcttcgtgacgaaacaagtttacgtacaggggtaagagtggttattgatgtacgtaaagatgccaatgcaaatgttattttaaataatttatataaacatacaccattacaaacatcatttggtgtaaatatgattgcccttgtgaatggtcgacctaaattaattaacttaaaagaagcgcttgttgaatatttagaacatcaaaaaacagttgtacgtcgtcgtacagaatacaatttgaaaaaagcgaaagatcgtgcacatatcttagaaggtttaagaattgcgctggatcatattgatgaaattatttctattattcgtgagtctgacacagataaagtggcgatggaaacattgcaagaacgttttaaattgtctgaacgtcaagctcaagccattttagatatgcgtttacgtcgtttaactgggttagagcgcgataaaattgaaaatgagtataatgaattattaagttatattgcagaattagaagagatcttagcaaatgaagaggtattacttcaactggttcgtgatgaacttacagaaattaaagaacgtttcggtgatgaacgtcgtactgaaattcaattgggcggtttagatcacttagaagatgaagacttaatccctgaagaacaaatcgtcatcactttaagtcataacaactatattaaacgtttacctgtatctacatatcgttcacaaaacagaggtggacgaggtgtacaagggatgaataccttagaagaagactttgtcagtcaacttgtaacattaagtacacatgataatgttttattctttacgaataaaggccgtgtttataagttgaaaggatacgaagtacctgaattatctcgtcaatctaaaggtattccagtcattaatgcgattgagcttgaaaatgatgaagtgattagtacgatgattgctgtaagagatttagaagatgagaacagtttcttagtctttgctactaaaaaaggtattgttaaacgttctgcattaagtaacttctctcatattaataagaatggtaaaattgcgattggctttaaagaagatgatgaattgattgcagttcgtcttactgatggtaaacaagatattttacttggtacagcacatgcctcattaattcgattccctgaaaatagtttacgtccactaggtcgtacagcttcaggtgtgagaggtatttctctaagagaaaatgacgtagtcgtaggtttagacgtagcctatgctgaaagtgaagatgaggttctagttgttactgaaaaaggttatggtaaacggacacctgtaagtgaatatcgtttatctaatcgtggcggtaaaggtataaaaacagctaaaattacagaacgtaatggtaatgttgtatgtattacaacggtaagcggtcaagaagatttaatgattgtaacggatggtggcattattattcgactacaagttgaagatatttctcaaaatggccgtgccacacaaggtgtgcgattaatgaaattaggcgataatcaagccgtatcaaccgttgcgaaagtcattgataaaactgaagatgaagctgcaactgaagcggctcaacaaacagaacatgcaagtgcccaaacgacagaaagtgcaaatgaacaagtgatagatgatacgacacctggtaacgctttgcatactgaatctgatgaagatgatgaacgcattgaagtaagacaagatttcatggatcgtgtaaatgaagatattgagaatgattcagatcagaattaaatataaaaataagacttccctatacgtgggaagtcttatttttattatttatctttctaattctttcattacataaggaatttgattaattaattttgaagggggcacgacgtacattttttcagaaagtttttcaccaatataactgtgaatataagttgcgctcgtaacggcatcttgtaagttattaaattgacctacaaaacttgtaatcataccagctaatgtatcacccataccacctgtagccattgcaggtgtgccaatgggtaatttgtattctttatctttaaagaagatttctgtaccgtgtttttttagtactacagtagcgcctaatttatccacagcttctctatttctttcatacgtttgttcttcaataggaataccacttagacgttcccattctttttgatggggtgtaaagataacacgacatgtaggaatatcaggtttaagtttacaaaatattgtaattgcatcaccatctacaattaagttttggtgaggttgaatattttgtagtaagaaagtaatcgcattatttcctttgaaatcaacgccaagacctggtccaattaaaatactatctgtattctcaatcatttttgttaacattttagtatcattaatatctattaccattgcttcaggacaacgtgaatgaatggctgcatgattagtaggatgtgtggctacagtaattaaaccacttccactaaaaagacatgcacgtgcagctaacatgattgctccgcctaaattttcactaccaccaattaaaagaatttttccataatcacctttatgcgtttcgtcattacgtttaggaattgtcacattagttaatgtttccatatgatgaatcctccctatttagattcgaaagtcataacttctatatattaaatcaatgaaatgatgagttattaagacaagcgaaaatatcatgtgcgttttaagtacaatagaaaatattatacctgcttaagcgtttcgtcaacactattttaaataaatttataaatgctaaaattgatagatattaacgtatatagtttgttatatttggaaaaggtaactgcttgaaaattatatatgactttgctatattaaaattaagttaataaagtattgttcgtaggctaagtaacataagggtattaatttcagagagcttgtggtgagtgtaaacaagtaattaatttttatgcgaatctacctacttatattgaacaatcggttttaaccgttatcgatagtggagtgcaatttagtttatttaattaaattgttaaatagggtggcaacgcgtagaccacgtcccttgtatggggatgtggtctttttttattttaaatcgctatggtcactcaatataaattttttggaaggatgaatatgatatgttagacatcaagcaattcagagacgaaacggacaaagttaagagcaaaattgaattacgaggagatgattcaaaggttgttgatgaagtattagaattagataatcaacgtcgtgatttaattggtaaaacagaagaaatgaaagcacgtcgtaacaaagtaagtgatcaaatcgctgaaaaaaaacgtaacaaagaagatgctgatgacgtcattaaagaaatgcgtgaattaggcgatgaaattaaagaaaatgatgcaaaattaaatgaagtagataataaaattcgtgatatcttaattcgtattccaaacttaattgcagatgacgtaccacaaggtgctgacgatactgaaaatgttgaattaaaaaaatggggcacgcctcgtgaatttgattttgaaccaaaagcacactgggatttagtagaagaattaaaaatggctgatttcgaacgtgctgcaaaagtatcaggtgcgcgcttcgtttatttaactaaagacggtgctttattagaacgtgcattaatgaactatatgttaacaaaacatacaacacaacatggttatacagaaatgatgacacctcaattggtaaatgcagatacaatgtttggtacaggccaattacctaaatttgaagaagatttattcaaagttgaaaaagaaggcttatatacaattccaactgcagaagtgccattaacaaacttctatagaaatgaaattatccaaccggatgtgttaccagaaaaattcactggtcaaactgcatgtttccgtagtgaagcgggatcagctggtagagatacaagaggtttaattcgtttacatcaattcgataaagttgaaatggtgcgttttgaaaaacctgaagattcttgggatgcattagaagatatgactcaaaatgccgaagcaattttagaagaattaaaattaccatatcgtcgcgtgatcttatgtactggagatattggtttcagcgcaagtaaaacatatgacttagaagtatggttaccaagttacaatgactataaagaaattagttcttgctcaaactgtactgatttccaagctcgtcgtgctaacattcgtttcaaacgtgatgcttcttctaaaccagaattagtacacacattaaatggtagtggacttgcagtaggtcgtacatttgcagctatcgtagaaaactaccaaaacgaagatggttcaattacaattccagaagcacttgtaccatttatgggcggcaaaacagaaattcgtccagtcaactaatcattaaatagaattcaactcataaagtgatagagtgacgtagtcctctatcgctttatttatttttatattaaaataagactgccctgagaaaggtaactttaaaaaatatcaaaaatttctgatattttaaaagtattgaagtttcaatattttaaaacatccttctctctaacctcactcaaacagacgtctaaagatattgaagcgcctcttagattatattagactgaatttaattatactatatagtcaattagaaaatatatatataaaggaggagctaacatgacgtcacatgtaacatttcaacaaggggtccaagaatgtattccaacactactaggatacatcggtatagggctatcatttggcatcgtggcagcttctcaagattttagtgttctagaaattcttctgttatgtttactggtttatgcaggcgcagcacaatttattatttgtgctttagtcattactggtacacctatatcagcaatcgtgttaacaacgttaattgtgaattcccgcttctttttattgtctatgacattatcacctaattataaagattacggtatatggaatcgtttagctttgtcttctattcttactgacgagacatttggcgttgctataacaccacacttaaaaggggaaacaattaatgaccgatggttacatggattaaatattactgcttattcattttgggcaatagcttgtgtgttaggagcagtctttgggaaatacatctctcatcctgaaatgttagggttagactttgcgattacagccatgtttattttcttggctatggctcaatttgaaacgattacacgttccaaagtaagtatatatatcgtattaattgcgttcgttattgtaatgatgttcattttaagttggttgatgccctcttatgtggccattcttgttacatcaatttgtgctgcaacacttggggtggtgatggatcgatgacgataactggacatatgcttttactcatcgttttatgtggattagtgacattaattgtgcgggttgtaccatttttaatgatttcacgtattcaactgtcagaaacagtcatcaaatggctgtcgtttattccaatttcattattcactgcgttagttattgatagttttatcgttcaacataaaggcatgcagggctttgaattaaatattccgttcattgtagcaaccattcctacagtcattatcgcagttgtgacgcgtagtctaaccatcactattattgtgggtattgtattcattgcaggtatacgatggttcttttaatccatttatttactgcgcattgaagttaaccagacaattgtattaaaataaatttaaattaaaccattcaatcaatatatagatactcttattttgagaagtagagggaattggccctatgaagcttcagcaaccgacaaatcatttgtacggtgctacaaccaacgagatactcgaatgataagtactaaagtattatcgcttcatacttttaaaattaagagtggaagcgatttttttattctaaggaggcatagcatgacaaattatacagtagatacattacatttaggtgcttttacaacggaatcaggtgaaacgattgagaatctaaaattacgttatgagcacgtaggttattcgggacaaccgcttgttgtggtttgtcatgctctgactgggaatcatttaacttatggtacagatgaacatcctggatggtggcgcgaaatcatcgatggtggttatatgccgatatatgattatcagtttcttacttttaatgttattggaagtccttttggttcaagttcccctttaaacgatgctcattttcctaaaaccataacattaagagatatcgttaaggcaattgaattgggaatcaaggcccttggatttactaaaattgatattttaattggtggcagtttaggtggcatgcaagtaatggaattattatataatcatcaattcgaagtagataaagcagtcatcttagcagctacggataaaacctcttcatacagtcgtgccttcaatgaaattgcacgtgaagcgattcatattggaggtaaagaaggacttagtattgcaagacaacttggattcttaacatatcgttcttcaaaaagttatgacgcgcgtttcacaccagatgaagtagtcaattatcaacgttatcaaggtaataagtttaaagaatcctacgatttatcgtgttatttaacgatgttgaatgtcttagatagtcatcatcttgatcgtcagcgcgatgatgtggatgaggtcttccaatctttaaatacaaaagtactaactatgggctttacagatgatttgttatatccagatgatcaagtcagagcagtaggagaacgttttaaatatcatcgtcacttttttgttccagacaacgtaggccatgatggttttttacttaattttaatgactgggcgcctaacttgtatcattttttaaaagtttcgaaattcaaacgaaaataatagataagagaacagttaacacatttgtttaatttgaatatagaaggtaaaatagaccttatagtcaaaaaagtataggagtggcgaatgtgttttcaaaagtacatcctaaagcaatgattataggaactatcgtgcttgtagcagttgctttagttacgtatgtattgccaataattggtctgattctatgtttattcgctaccattccagggattatcatgtggcataaatcaattgctacatttggaattggagctttactcactgtagtcatcacgaccttattagggaatacctttgtattaagtgccatgattctagttttattactaagttttgtaattggccaattattaaaagaacgtacatctaaagaacgcatcttatatatcacaacaatgtatataagtattgtgacgttaattgcatttatgttattacaagcgttcaaaaagattccaaataccgaagtattgattaaaccagcaaaagacgcaatgaacaatgcgattgtaaattcaggcgttgaatcagattataagatcatcttagaagaaggatttcgtcaaatggctgttcaacttccaagttacatcattattattgtttttcttttagttttaatgaatatcatcattacatttccaattttacgcaaattcaaagtagcaacacctatgtttagacctttatttgcttggcagatgaatcgcacattattatggatttacatgattgtgctagtatgtgtgatgtttgcgatgaaaccaagtatattccaaagtatcgtattgaatttcgaagttgtgttatcattattaatgtatatccaaggattgagtttgattcatttctttggaaaggccaaacgattacctgatgcggtatccatattattaatggtcgtggggacagttatttcaccctttacgcatatcgtatcattacttggcgtacttgatttaggaattaacttaaaacgaatgattaaaaaatgactttaaaaagtgaatagaggtggaagaatgaaccgtcaatccactaaaaaagcattgcttattccttacattttgatggtgcttacggcaattgcaattgttattgtagggtttatatttaaacctttaatggcaacgtttacggcgattgctttaatgattatgattgtcattagtgctgtattgattaaacaagcattatcaaaaatggatcattatgtggataatctgagtggtcatatttcagcaggaagtaataaagcaattaaacgcatgccaattggtttagttgtgattgatgctgacgatcacatcgaatggatcaaccaatatatgtctgaacatctagaaacgaatgtcatctcagaaccagtcaatgaagtttttccgaatattcttaagcaacttgaaagagtacaagaaatagaaatcgaacatggtcagtaccattatcatgtacgttattctgaagaagagcattgtttatatttcttcgatattacagaagaggtacatacaaatgaattatatgaagaatcaaagcctattattgcaacgttgtttttagataactacgatgaaattacacaaaatatgaatgacacacaacgttctgaaatcaactcaatggtgacacgtattattagtcgatgggcaactgaatataacatttattttaaacgttatagttcagatcaattcgtagcttatttaaaccaaaaaatcttagcagaaatagaagattctaattttgatattctaagtcagttacgtgaaaaaagtgtaggctatcgtgcacaattgacattaagtattggtgttggtgaaggtaccgaagatttaattgaacttggtgaattatctcaatcaggacttgatttagccttaggtcgtggaggagaccaagttgcaattaaaaacatgaatggtaatgtccgtttttacggaggtaagactgacccgatggaaaaacgaacacgtgttagagcacgtgttatctctcacgcattgaaagatatcttaactgaaggcgacaaagtgattattatgggacataaacgtcccgacttagatgcggttggcgcagctattggagtatctcgatttgcgtcaatgaataatttagaagcatatgtggtacttaatgaagaagatatcgatccaacattaagtcgtgtgatggaagaaattgataaaaaacctgaattgaaagaacgatttgtgacatctgatgaggcttgggatatgatgacgtcaaaaacaacggttgttgtggtagacacacataaacctgaaatggtattagatgaaaatattctaaataaagcgaatcgtaaagtagtcattgatcatcatagacgtggagaaagctttatttcaaatccattactcgtttatatggaatcttatgcaagttcaactgcagaacttgtcacagagttattagaatatcagccaacagaacaacggttatcacgtttagaatctacaattatgtatgcaggtattattgttgatacacgtaattttacattacgaacagggtcaagaacgtttgatgcggcaagttatttacgtgcgcatggtgcggatacaattttaacgcaacaattccttaaagatgatgttgatacgtatattaatcgttctgaattgatacgcacagtggaagttcaagataatggtgtcgcaattgctcacggttctaatgataaaatctatcatcctgtaacagttgcacaagctgcggatgaattgttaagtttagaaggcattgaagcttcttacgttgtagcgaaacgtgaagataatcttattggtatttcagcacgttcattaggcggtattaatgttcaattaacaatggaagctttaggtggcggaggtcacttaacaaatgctgcaacgcaaataaaaggtgtcactatagaagaagcaatcgagcaattacaacaagcaattactgaacaaatgagtaggagtgaagatacatgaaagtaatatttacacaagatgttaaaggtaaaggtaaaaaaggtgaagttaaagacgtgccagtaggttacgcaaataactttttattaaaaaataaatatgctgttgaagcaacaccaggtaatttaaaacaattagaacaacaaaatagacgtgctgaagcggatagacaacaagaaatcgatgatgctaaagcattaaaagcaaaattagaagatatcgaagttgaagtaagtgctaaaactggtgaaggcggtaaattgtttggttctattagtacaaaacaaattgctgacgcattaaaaaatcaacacgatattaaaattgataaacgtaaaatggatttaccacacggtattcacgcgttaggttatactaatgtacctgttaaattagacaaagaagttgaaggtacaattcgtgtacacactgtagaaaaataaaaaatttgggacacacataggtagtccactcttttaaaaacaattcatagaaatagatataatgttgcactagcatgtcgaaaattttaagatggatgggtgtaatgattgatggataatatgtatgatcaaagacaaatgccccataacaatgaagctgaacagtctgtcttaggtgcaattattttagatccagaattaataggttcgactcaggaggtattacttcctgagtcgttttatagaggtgcacaccaacatatcttcagagcaatgatgaatttaaacgaagatgctcatgagattgatgtagttacgttaatggaacaattaacgaaagaaggtacgttaagtgaggctggtggccctcaatatttagctgaattatcgaataatgtaccgacgacacgtaatattgaatactatagaaatatagttgctaatcttgcgcttaaacgtcgattaattcaaacagctgatagcattgcgaatgatgggtataataatgagcttgaattagatgctattttaagtgatgctgaaaaacgtattcttgaactctcagcaaaccgtcaaagtgatggatttaaagatattagagatgtcttaggtcaagtatatgagactgcagaggaacttgatcaaaatagtgggcaaacgccgggtattcctactggatatcgcgatttagaccagatgactgcgggctttaatagaaatgatttaattattttagcagcccgtccttctgtaggtaagactgccttcgcacttaatatcgctcaaaaagtagccactcatgaagataactatacagtaggtattttctcacttgaaatgggtgccgatcaacttgcgacacgtatgatttgtagttcaggaaatgtagattctaaccgtttaagaacagggacaatgacagaagaagactggaatcgatttacgattgcagtaggtaaattatcgagaacaaagatttttattgatgatacaccaggaattcgtattacagatttacgatcaaagtgtcgtcgtcttaaacaagaacatggtcttgatatgattgtcattgactatttacaacttattcaagggagtggctcacgtttttcagataatagacaacaagaagtttctgaaatctcacgtacgttaaaagccatcgcgcgtgaattagaatgtcccgttattgcactgagtcagttatctcgtggcgtagaacaacgtcaagataaacgaccaatgatgagtgatattcgtgaatcaggatcaattgagcaagacgcagatattgttgcgttcttgtatcgtgatgattactataatcgaggcgatggtgaagaagatgacgatagtacgcagttcgaacctcaatccaatgacgataatggtgagattgaaattattattgctaaacaacgtaacggccctacaggcacagtgaagttacactttatgaaacaatataataaatttacagacattgattatgcacatgcagacatgtcataaaaatattttttaccgtacattattattatttttaatataaatgtacggtttttattttatttttgaaaaataaagttaagtgaagtatgtgtattaaatatttgtaaaactgtcttgaaatactggtaaattaacaatgttaaaggttttttaataaaatatacatattgatttgactgatgtgaatactatttttaatgttcgatttttatttgcattatataaaacgtattgatagaatacttagtggttaattgagaaaactttggaggtgctcacatgtcatcaatcgtagtagttgggacacaatggggagacgaaggtaaaggtaaaattacagatttcttagcagaacaagcagatgtgattgcgcgtttttcaggtggtaataacgcaggccataccattcaatttggtggagaaacatacaaattacatttagtaccatcaggtattttttataaagataaattagcagtgattggtaatggtgtggttgtagatcctgttgcattattaaaagaattagacgctttaaatgaacgtggtatttctacagataatctacgtatttcaaaccgtgcgcaagtcatcttaccatatcacttagcacaagatgaatatgaagaacgtcgtcgcggcgataataaaatcggtacaacgaaaaaaggtattggaccagcttacgtagataaagcacagcgtattggtattcgtatggctgatttattagaaaaagacacatttgaaagacgtttaaaagaaaatattgaaattaaaaatgcatatttcaaagggatgtttaatgaaacgtgcccacactttgatgaaatattcgatgaatactatgccgctggtcaacgtttaaaagaattcgttacagatacagctaaaattttagatgacgctttcgtagctgatgaaaaagttttatttgaaggtgcacaaggagttatgttagatatcgaccatggtacatatcctttcgtaacgtcaagtaatcctgtcgcaggtaacgtgacagtaggaactggcgtgggtccaactttcgtatctaaagtgatcggtgtatgtaaatcctatacctctcgtgtaggtgatggtccattccctactgaattattcgatgaagatggtcatcatattagagaagtaggtcgtgaatatgggacgacaacaggacgtcctcgtcgtgtaggttggttcgactcagttgtattacgtcactctcgtcgtgtaagtggtattacagacttatctattaactcaattgacgttttaacaggtttagatacggttaaaatttgtacagcttatgagttagatggtgaaacaatcacagaatatccagcaaacttagaccaattacgtcgttgtaaaccaattttcgaagagttacctggttggacggaagacattacaggttgtcgtacattagaagagttacctgaaaacgcacgtaaatacttagaacgtatttctgaattatgtggcgttcatatttcaatcttctctgtaggccctgaccgtgagcaaacaaacttattagaaaaattatggtaagaaaagcgtataaacatagagcaataacgtgctaaaagcgaaaatcggtttttaattttaagatgagcatatgattgacgagagggttgttttcgaagcccgttaataataaagtatttaatggtatacatttaacgttgttaaagtgactcactttagcaacgttttttatatacatcaaataagataataataaccgtctcatttaaatttggatgtgaataaataatgtaaaagtaaagaaaaaacgtatattgtcatgtaatctcccttcaatataactctttttttctaaaaattaaggaattataaaaaaatattaaaattatgtaaaaaagttcttgtctttaaaataaaagctatgctataatctatcttgtgcttaagaacggctccttggtcaagcggttaagacaccgccctttcacggcggtaacacgggttcgagtcccgtaggagtcaccattttaggtctcgtagtgtagcggttaacacgcctgcctgtcacgcaggagatcgcgggttcgattcccgtcgagaccgtattgcttatccaaaagggtaggcattttttttatgcttttttaatattgcttctttatttttataaatatatagacgttatcatgagtaaagcgatgtgtgtattacaaatagatgacgtcgcaatatatttttaatacttctctctttttttatacatcttttatatattactcttaattttcaacgactatccactatcatcattttgtaacattgtaccgtttcagtcttcctaagacttttgtccaatattcaaggagctcaacttatttgtaatataaaacgagcgtggtaaactttaaattaatgttattctataattttaaatatgaaaatagaattaagtgaatattaatgttaaattatatagtagataaacgtgcgttaagacgtaagatagcgccatataatacagttaatgttttactcaaaatataataaacattaaggtttgaactacaatttgagaaatgaggtttatagatatggctagaaaagttgttgtagttgatgatgaaaagccaattgcggatattttagaatttaatttaaaaaaagaaggctatgaagtgcattgcgcttatgatggtaatgatgccgtcgatttaatttatgaagaagagccagacatcgtattgttagacattatgttacctggtcgcgatggtatggaagtatgtcgtgaagtacgtaaaaaatacgacatgccaattattatgttaacagcgaaagactcagaaattgataaagtattgggccttgaattaggcgctgatgattatgtgacgaaaccatttagcacacgtgaattaattgcacgtgtgaaagcaaatttaagacgtcactatgctcaacctgcgcaagaatcagaaggtacaacgaatgaaattgcgattaaagatatcgtaatttatcctgaggcttattcaattaaaaaacgtggtgaggatattgaattaacacatcgtgaatttgaattattccactatttgtcaaaacatatgggtcaagttatgacacgtgaacacttactacaaacggtttggggatacgattattttggagacgtgcgtacagtggatgtaaccattcgtcgtttaagagaaaaaattgaagacgatccatctcatccagaatatatagtgacacgtcgaggcgttggatacttcctccaacaacatgattaggggttgcaaacgatgaagtggctgaaacaactccaatcccttcacacaaaactcgttattgtttatgtcttactgattattattggaatgcagattattggtctgtatttcactaatagtttagaaaaagaattaactaataatttcatgaagaatattaaacaatatgcgacacaactcgaagtcaatattgagcgtatttataaagataatccttcaaatgcacaaaaggaagttcaatcgctactgaatgaatacgctaaccgacaagagattgaagaaatccgctttattgataaagatcaaattataatggctacagcgaagttatcatcacatagcttaattaatcaaaaggtgaatgataattctgttcaaaaagcaatctctcttggcgaagcaaatagtcataacgtcttaaaagactatggtaatggtaaagaacggatttggatttacaacttaccagttaagaatggcaatgatgtgatcggtaatatttacatagagtcaaatattaatgatgtatataaccagcttaacaatattaatcaaatctttattattggtacggctatttccttatttatcacggtcatactcggtttctttattgcgcgaacgattacgcgaccgattacagatatgcgtaaccaaacagttgaaatgtcgaaagggaactatacacagcgtgttaagatttatggcaatgacgaaattggtgaacttgcgcttgcgtttaataatctttctaaacgtgtacaagaagcccaagcgaatacagaaagtgaaaaacgtcgactcgattctgtcatcacacatatgagtgatggtatcattgcgacggatcgacgtggtcgtattcgtattgtgaatgatatggcgattaaaatgttaggtatggcgaaagaagacctcattggttattacatgctaaatgttttaaaaatagaaggcgatttttcattagaagaaattcaagagaataatgatagtatcttaattgatatgaacgaagaagaaggtattattgcacgtgtcaactttagcacgattgtacaagatacaggatttgttaatggttatatcgccgtattacacgatgttacagagcaacaacaagtggaacgtgaacgtcgcgaattcgttgccaatgtatcacacgaattacgtacgccactaacctcaatgaacagttatattgaagcacttgaagaaggcgcttggaaagatgaaaatcttgcgccatcgttcctttcagtcacacgtgaagaaacagaacgtatgattcgactggtcaatgacttacttcaattatctaaaatggataatgagacagaacaaattacaaaagaaattgtcgactttaatatgtttattaataaaattattaatcgacatgaaatggcagcgaaagatacaacgtttgtacgtgaaattccaaatgaaacgattttcacagaaatagatccagataagatgacgcaagtatttgataacgtcattacgaatgcgatgaaatattctcgtggagataaacgtgtcgagttccacgtgaaacaaaatgcactttataatcgaatgaccattcgtattaaagataatggcatcggtattccaattaataaagtagataaaatctttgatcgcttctaccgcgtagataaagcacgtacacgtaaaatgggtggtacgggtcttggactggccatttcaaaagaaattgtcgaagcacataatggtcgtatctgggcaaacagtgttgaaggacaaggcacatcgatatttattacgcttccatgtgaagtgatagacgacggtgattgggatgaacagtaaggaacatattaaatcagttatcctttttcttttagtcatgatgagtattgtccttacgtatatgatttggaactttactccagatttaaataatttagacagcgcggatagtaaaaaaaacaatactaaaaccattggtaaagttttagctgcaaagatggacacagtgatttcaccttatcaagttgtgtcagttaaaggggataaagtaaaaggattgacaccatcaagatctcaactcgctcaagttattgatccactcaaagatcatgaagtgagtaaagtagaattgatgcaaaaagggtataatttgcaaactccgatattagaccatgattttgtcgtattggattttacgtatgatatgccattaaccacctatttaggtcaagtacttaataactcagctaaaattcctaaacattttagctttaatcgaattttaatggataaaaattctaagggtgatctagaattatatgcgctgagtaaacatcatcaacaagtcatgaaagtgacgatagacgcgaaggcaacaccatttactaaaaccattcatcatttagaaaaagatatggaaacctattcggaagtgattacgaataagacaacgattgataaatcaacgcatatttttgcgccgaaacatccaaaagacctacactcatatcgtatggtatatgatacgatttcagtcgaaacgatgaactcaattttatttgatgattctgtcattattcgaagcggaaaaagtggttcaaccacatataataataatactggcgtcgcaaactataatgatgacagtaaaaagtaccattataaaaacttatcggaagatgaatcaggttcgaaagatatggatacttccatcccaagtacattcgaatatattaataatcatggtggtttctttaacgatgatttccgtctgttcgatacagataatatgtcaggagaattaacctatcaactattcctcaatggacatcctacatttaatgatcaacagttgaatgaaattaatgtgacttggggagataaaggaatttatgactataaacgtgctcttctacgttcaagcgtgcctttagaaggtgcaacgacatcattagatagtttggaaacggtgcgtgcgacacttgcaaataatcataacattgattttgaaaaagtatcgaatatgatcgttggctataaagaagatgataagccagataaagatgacatcgaagtacaacgcaatagtgtatttattccaacgtggtatgttgagtatgatggtgagtggtatgtatatcaggatgggaggcttgaataaatgaactggaaactaaccaaaacattgtttattttcgtgtttgttctagtcaatatctttctcattctgatttatattaataaggtgactaaatcgcaaattaatgaaactgaaagcgataatgaagtcaacttccagcaagaagagattaaagtatcgacagatgtattaaataaagatgtaagtggtacgaagatgcaaatgattactgctacttctaagaactttaaatcatacgctgaaaataaatcttcattagaaacaagtgattctggtttcacattaagcggtgaggtagataatactgtaaatgtaagtgatcgtaatcttagtgatttaaaagattacattatcaatcatatttataatggtaaggtctatcaacttggcgatatgaattcaaatacagtcacttacgaacaaacatataatggatacccattgcttaataacaataaagcacggcttcgctttaatatagacgatggtaaagcgatcacgtataaacaaacattaatgagtaaaattgaacctgcaaaaggtgacaataatcctaagaagcaagtcattacgccgcgtaaagcaattgaaagcttgtatttcaatcgttacttaaaagctggcgatgaagtattagatgctagactaggatattactcagtagtaagagaaaccaacgttcaattactacaagctaactgggaaatcaaagtgaaacataaaggtaaagaagaaacgaaaaaatattatgttgaagccacttcaatcaatcccaaagtgattgataactagaaaagtgattcattttaaatagagcaaaacagcggtcaaatttacccgttgttttgctcttaaatcgttaatataaacagagaattggaatttctagttacaggttggtatagtataatataaaagtacttttagagcggaaggtttcgaacaaagatacaagttcgaaactatatttttttagaaaaaaagtaaatataaaataattagactgaaggcactctaaataattaaaatttaagataatgagaaaggatgaaccatcttgattcgaatgagcgtattagcaagcggtagtacaggaaacgcgacttatgtagaaagtgagaaaggcagtctattagtagatgtgggtcttacaggtaaaaagatggaaaatttatttagccagattgatagagatatgaagaatctgaatggcatcctagtgacacatgaacatagcgaccatattaaaggacttggtgtcattgcacgtcgatatggtttacccgtgtatgcgaatgaaaaaacgtggaaagcgattgagaaaaaagacgataaaattccaatggatcaaaaatttattttcaatccgtatgaaacgaaatccattgcaggttttgatatagaatcatttaatgtctctcatgatgcgattgatccacaattttacattttccataataactataaaaaatttacgatgattacagatactggctatgtgtcagaccgaatgaaaggtatgattcaaggtagtgatgcatttatgtttgaaagtaaccatgatgtggatatgttgcgcatgtgtcgttatccttggaagacgaaacagcgtattttaagtgatatgggacatgtgtcaaatgaagatgcaggacatgcgatggcggatgtgattacaggtcatacgaaacgtatctatctttcacatttatctcgtgataataatatgaaagatttagcacgaatgagcgttggacaagtactaaatgaacatgatattgatactgaaaaagaagtattattatgtgatacagataaagcacaagcgacaccgatttatacgttataaaattgaaaagaagtatgaagcttaatgaaaatcttaagaaagtatgaggtttttattaagctctttttttttgaaaaattaaagttattatctaacaattggactatacatgaatattcattaaaaggtggataaatagtgcgatttagttagaatctgtgaataaatataaaagacggtcgtgaagttatccccaaattcaaagaaagttatccactattgtgaataatacacacagaaatactcacattatacacagacttatccacaaaaatagtgtatatgtgacatttttgtagataaatctcaaattttccacagaatttatatgcattcctgttataattagagggaattctgttaacaagttgataacttgtggataagtcgaataactattatcaacacggaggactataatgaagattactattttagctgtcggcaaattaaaagaaaaatactggaaacaagcgattgctgaatatgaaaaaagactcggggcatactctaaaattgagatgattgaagtaccggatgaaaaagcacctgaaactatgagcgacaaagatattgaacaagtcaaagcaaaagaaggacaacgattattagccaaaattaaaccacaagccaccgttattacattagaaatacaaggtaaaatgttgtcatcagaaggtttagctaaagaactgcaacaacgcatgactcaaggacaaagcgacttcgtcttcgtcattggaggatcaaacggacttcatcaagacgtcttaaatcgcagcaactacgcactctcatttagcaaaatgaccttcccacatcaaatgatgcgcgtcgtcttaatcgaacaagtatatcgagcatttaagattatgagaggcgaagcgtatcacaaataaaactaaaaaataagttgtatataacttattttgaaattggttaagtatatagtatctccaataaaatgtagttaacttacgataatgctgaactatagctttgtaaactaaaatgtaaataattacaatcaaattgcaacaatatagttcaagaatgctacaatttgaggacagattgatagcattaatccctttaaaatgaagctaggagatgacttacattatgattagtaaacaaataaaggatttacgaaagcaacataattatactcaagaagagctagctgaaaaattaaatacttcaagacaaacaatttctaaatgggaacaaggtatttcagaaccagacttaattatgcttatgcaattgtcacaattattttctgttagtacagactatctcattacaggaagtgacaatattattaaaaaagataataaaagctattatgaaatgaatttttgggcatttatgtctgaaaaatggtgggtaattattattatagtaatcataatttgtggaacaataggacaaattttttcaaactaatgtaagtatctctcaaatattttgggaggttttattatgaaaatcaaaaaattattaaagacattattaattattttattatgttttgtattgtctgttattgtgcaaaatatttcaatgctatggcatattgtgagcatttggagtgttgaatatattttacatgcattaacttatatagtactttcatacttttcagtaaaatggttcattgaaattgttcttaaaagcaatatgaaagattatagaataataccggtgaaatttttcaagtcttgttttcttataggattaattttgatattagtaattgatttaatatatctattatttattcctggtaaattgataatacctcattattcaacaagcgttggatttatggagatgttctttagcgcatttttaattactggtattgctgcgcctatatttgaagagatggtatttcgaggaatactaatgagatactttgaaaaacaatatggaattttatttggaattataataccctcgattttattttctcttgttcatctatttaatggagagttaaagggagaaaatttattattactacttataggtggctcaattgctggaataatgtatgcagtgactgcatggacgtttaatagtatatgggcctctgctatattacatatgctttggaatataaatggtttattaaatatcacaactcaagatgatcattggggagtatatcagtacatattagaaacaaaaaatgtactgattacaggtggggattatggtatggatacatcattactttcaatatgtagttatattgcagttattatagttatgattgttactaaaagacactttaactttttactaaagtaattatagaatagtgtggttaatcctgacgactagtcggatacaatttaaagagtaataaaaagtgtattattaactgatatgcaaaagtatcccactaaagaaataaaaaaaacagatggtagaatatgttagcatttaatatacaaattagtttttaacttacatgaaaactagttcaataaaaaagttaaattaggagcttattatgaatatctatcaaacctatgcatgcttagtcataggaataatcgttaatagtactactactatactaaaaagaaaaaaattaatttcaaatattaaacaactttggaaaagtaaaaagactttagaagaatttatacgttcaaattcgagatttgattattagtttaatcttcgacgtaagaattattctgatacattagtagatgataaaacatggatagacttagatatggatactttgcttcataaaattaattttaactatacagttatcggagaaatgaactccctataatctaattgagaaaatataagaagaaaaaatttaaggttttagagtcccatgtattattccgttctttcttgatagatgtgtaatattttagtggatttaataattagtaaatttttaacaggcataataacttacaattaagaaaagattaaaacttattaataatagagaggttatgtgaataatgaatgatttgttaaaaatttatgaaaaattgaaaaaagatattgaaaacaggtggttaataccatttcattatgtggtttttggattagcattagttgtatattttctggaaattcctatttataaattggtgaataacttagataaagagcttgttgataaggttttatatgctttttcattagtgtatgatcacattgtaatgatatttatattaattataattatcattttgatagtttatttattctttgatgtgtttaatatgaatcgttttgttccatcgcctacaacttatgtagatggtagtgaaagttctataaactatgtaagtgctattaaaagattgataaactttatgatattaattatcacaaagtactggataacttactttattgtaaacttaatatttcataatgataaattactgtatttaaacaatgattcaaaacatttgtataagtgtctcttgtttttaaatatctgtatctttatagtgcatatattaaaatcaatttttataataaaaattatggcagatgattcgctaagacttattaatgaaaatgatttaactgatttttacataacattaaataaaaatgatgaatatcgtatggtaaaacctaaatatagaaaaatagataattttattattattaaaaaaagtgaagatttcactaattcaaatgagtataaagttattaataaaagtaaaaattttgaggaaataatttatcattttgacaatcttacttcaaatcattgatgatttataaattattattctaagtttaactagaaattaaatttatgcgactgaaacaacttgttgttttggtcgtatttatttagccaaaaattagtttttaggaaaggaagacttcggccgctatcaaataagtcttactttaatgatattatttcttatatcgtaaggatagaaagatataatttattaattttaattaaaattaaatttttctaaaattctttggttacatcacttttaaaaaagggaaaaattgtatgataagaatgtgattaattatttataaattcaaaatttaaggagtttaatatggaaattaaatgtaaatatcacattacggataatatttagaagtatattaaaatcaatttagaagaagatttaagcttagtagaaagcaaaataatatattaaaaaatatgtaaatgtttcacaaaagcgaataaagtttaagtaatagtgtaaataatttcttaggaaataagatatataaaacattttttagtgtttattttgttatattataaaaataatagatagagtccaattatttaataagataaattgaagttgagaaatttttaaatatgaatgtaggaaatcaaattagatattatagaaaagaacgtaattatcacagatgaatttagcagaaaaattatttatatcaagtcaaacgatttctaatcgggaataactttactaagtatatttatatttagacttttataagtaataaaactataggctataagtgggaaggtgtatattattatttcaagtgttaaaggttctaatgttaaaaaaattattaataaaaaaattattattaaagatcttacttttaaatttcctaaaaatgaaattatattaattgagggcagtaatggatgtggtaagtctatgatgctcaaaatgatagtaggattaataaggcctacctctggaagtattaaagtaaacggaaaaattagctatgctccggattatttgccttctacaataaatttaacaataagagaatatttagattttctagataatatatacagtaataacgaacataatatagaagatctaattatttatttcaaattaaataatttattagataggagattgaatttatgttccaaagggacaaaacaaaaagtaaatttaattcaatgtttaattaaaaatgcagatatttatatattggatgaaccattttctggtttagataaagaagcaataataagtttgaaaaaattaatcgttcaaaagcaaaaaaatgcaactattatattaacatctcatgaagaattactcgatgaaagttttgttactcataagttcaacttagaaaataaaaaatggatagaattacagcaacgattaaatccctataaagaaataaaagttaacaataaaaattacaataaaattaaagatatgatgaaaagtttcgatagagttaaagtatttcatcataaagaatacactattataaatgttgataatagacagagtaataatgtactaaaagtgttaataaataatggttacttaattgaagaggtgagtaatagaaatgattgaaccaatctattattttttcaaaaatatgattagatcatataaatttattgctccatatagtgtatttatattgatagtagttattttatattattattcagggcaaccagctttatctagttttggtactacttcaatgttattactttttatttctatttggttaaatttgattacttttgatttagaatcagtagaagaattacaattactacttacgcaacttggtagatcattgtatctaacatctaagctgatattcaactttttaatgaccgtaccattaattatttttgccattatatatccattagtatctcttaggtttgaacatttaccatctcttacagagatattaataggaattcatgtccatattataattagtattactgcaataatattaacagcattatttaaatattctaattttttatcaagaaaatacagttggttattattaatattgatatctttgttagctattttaaaatcaaatattattaaagaaattcctacttttaaatatatttcatttattttaccacctataagtgaaatgttgaattatctaaatcaacaagatatttctatttttaatagccaatttttgatagtcaatatatggtactgcgtatatatagtattttttattataattatatacattatatttaatagaaaagatatcatagtattaaataagtagttttttaatagatatatataaatagagtaattaaggagaaagctaaatgagtgaaaaagaaaggacattaaacaagcaaaattctaaaatatcaaattcagttaattcagaaaatgaaggaatagggtttcaatttgtagtgccaattgatgagcaaattattatcaatataaataaaattttaagtgattacaatattaaattaaagcgaacagaatttaatcttacctcaaaatttaacacgagtgagttaggcaggttacaaagtgaggttggaaaatacaataatttcattattcaatatgaaaaattaagtattaataatgaaaaaataaagataaaaataaaaagtaaagagcttaatgaaatgaaaattaagattgaagaagttcttaatattaaagaattaattttattagatttaaagaaaactaatttaaatgatgaagaaaagaatgaactatttaatgaattggaaaagttatttaaaaattataaaacgaagaagaaagctcatcaacttgtatctattatatatacaaagctttatataaacataaatcaaaatgaaagaaccaatgtcggttatttttatttaaataataaaagtgatgacatggaatttaaaaaattacatattcgtgaaaaagttgatttatctgaaaaaattatgacaaatcaaatgaaactactttacaagatatttgatatagacatttcaaaatatcaaccggataattatcatggcaaatcagaaaataatcagtttaattacagttttaattcttcacaatatcaaatattaagtattcttataagattattaaaaaaatatcccttacctactactcctaataatatagattatatcaatgctattaatgaatccatttcaaaaagtaatgcacaagaattcgaagattttttaaaattgggaataaaagaagtaaaggatatagaattcagaaaactaaaaaaaatattagatacagatttttcttttcaaactatgaaacgtttagcggcagaaagtgatattctagaaaaaaagctaattacattttttaatgcagtgaaagaaagtaacttctatgaaaatgttattttatatcaaaaattaagtagtgctatcgagagggtgctatttgagcatcaagatgaaaaagaaaattataataaatttattaagagtttgagaagtaatgatgattcaattatcacttttgataatgacatagcatctaaatatcaatcattgaaagaattaattttgagtggtaaaagtggtgattttaattctttatatgatgaatttattaattattctagtatagctcataaacatgaaataaccgaagaagagactgattcaatgaacacatcaccacacacttctattaatataaaagaagtatttattgataaatataatttcaagataccttttattgatcaaattttactaaagagtcttcaatcagataataaaaaatttttagatgctagaaatctttatctaaaggaataccttgcacactcttctttagaaaaaagtattagtagtactcaatcttttattccagacagagaaattcaagaaggaataaatcatctaaatcaagctatcgatcatcttggtttacaactcttaaaaaaagatatacgtaatcataatcaatatacatcttatacccatccatttcttaaagaacttagaaggatgaaacgagaagtaagtatatttaatagagatagtatcaatagaaaaccacgaataactaatgaaatttataattataaacctaaaaatactaatatattcacagatagattaagcgagctagtaaaagaattaatgtatttaaaaataaaaaaagaattatataatagcagtaaatatactgattaaaaattaagtatgagacaaatcttattacaagatttgtctttttttgttaaataattaaatttatctaatcgctcccccctaattatgacttttggatatgctcctgattaatacaaaaatatggattatgataattgtgcaacgttgcttatatcaattcccgggaattgaattaaattaattttgatataggagagttgcccaatgtttaaagaagttagattaaatcaccagtacggtgtaagtaaaaatgaacataaatttgaaggacagatcgttttgccagatggatttagttctaatattgtattccagttaagtgatcgtgctaattcgcttatcactttaatgataggtacagcgcttatgctaccaagtggatcatctttttcttgcaatagcatactagatgaaattggtggcgatgtttattcagatatctacgacgatgaaatttttgtaattaattatctttttgatttgtattttgaatggcgatgttctttgtatgagctaggtgaggaggacgccgttaaatacaagatatttaaaagataaaaacaacatgtctcaatgcttaataatagcattgagaccatcttattaaaattaaattattaaatagataaaagaaggagaatatatcatgatgatgaataatagtaaaagtaaggattcagaaaattttagaatgaaaatagtgtttttaccagaaagtactaaaacgcaagagtggttgattaaacttaaatcagatcaattagaatgcttgaaattaaaggagcagttcattcgttcttcagaagaaaagtgtaacaatcttgatccagaggataaaactgagttagacaaatatgttcatattcatcgggaactagttcctctaaaacaagatatagaagttaatggatttaaaataaatactcaaatgctgtctaaagtaaaaacccaaattttaaataaagctaaaagtgttagtcatcgggaaaaattagataaaaacttcaatgtactagaatcagccattgatggtaaccaaaagttggatactaacatttctttaattgggactcgcacccatcgtataacgactagaaattttaatgttcaaggattacctaaagaagtgaagcaatttatattatcaaagcaatttaataaagtatttatgattgatttcaaggcgtttgagccatctgttgtagcttatttggcggatgatgatcatttgaaagagtatctcaatggtagtcagggcttatatgacacattactcaataacttatctcttccaaaaactcatcgtaagcttgtgaagcgtgcatttataggttcattcttgtttggtggaaattacatgagtaacaaatttaaattgaatcaatatatatcagaagttgaatggaataaagcaatgagcaagtttagcaatgtaataaagctaaaagaacaaattgataataaaaagataatgaagatgccttatggtattactcacgatatgaagcattaccatggaagcagtattatggggctatatattcaaacagcttctagttatatctttaagaatatcttatgggaaatatatcagcatcagtgtgatcaagaagatttcagaattatgctcccaattcacgatgccattatgattgagtacaatacagaagaagttgctgatcgtgttagacagttaatggaaacaagtgctaatcacttgtttggaggtaactttgctcataccacaattgaataaatgggaggaaatcatgatgataaataatagaggacaaaatttatcaataccatcatcatcagcgctagttaaagataatatttacgttgcaaaactgcattctgttggactatcagattttgaagataataagcatgtatttacttatgaagtagttctacatggccaaatatataaaattcgaagaagtattgctttaaaccctagtgataatcaaatttctatttttgagtggctggaacgccatagtaattatagtcctagtcacactaaatatggttcctatatagatcatgaacacttaatacttgttgatgaatacgaaggtcgttattttgtacgtgatgtagcaccattagaaaatatgatggaggataaagtaaatgaataatacgatgaaattagcaaaacaattattaagtgaaaataaggaggcaatcgaccgtaatggtctgattgcacttcttgaatcacaaaatacaagcgataatgaggaagatttaccccaagctaaagcaatatataacttattgattgaagaattgaactttgaaataagcactgatattaattatcgttcaaatatttacggttattacggtataaaaaataaacctaaagatactgaccttgttcaaatggctacacaaattttgaatgttaaacgttttgagtcaaaattatttatgttttcaaaagaaggatggcaaaagctagatgatagtgaattaagaagtatagttaggaaaactatgcaggttatattaattgattatacgcctacccaaagtgaattgaagagtgtcatagatggcatgaaagaatccgcagatatagatgaattggtagaagatgaacgatatataggttgtcatcgctatttattcgatttagaacagtttcaagtcattgataactcaatcgatatctttccgaaaacacgattagatgtagaactagataaaagtgatagtattacttcatttataccgtctcattttgataaatatatatcagaattagctaattttgatgctaatttacaacaatttttaattcgtcatacggctgtattacttacatcaaatcgtaaattacgacgaggattaattttttatggtgaagcaaataatggcaaatctgtatatatcaagttaatgagatcattcttctatcggcaagatgttgtttctaagacgttaaacgaactgggtggaaaatttgataaagaaagtttaattggtaagcgattgatggcaagtgatgaaattgggcaatcaaaaattgacgaaaaaaccgttaatgatttcaaaaaattattatcagtagaacccatacatgttgatcgtaaagggcgtacacaagtagaagtcacattagatttaaaacttttgtttaatacgaatgctgtcctaaattttcctccagaacatgcgaaagctttggagcgaagaattactattataccttgtgattattatgtcgaaaaagctgatattgatttaaatgacaaattaaaaaatgagaagaaagatatctttttatatttaatgtacgtatataaacaaatgatgattgatgatattgacagaattgaaaatgaaaaagtaacggaattgactcatgattggcttaatttcggttatgtattcatggataagtctaatacatcaagagataatcaaaaagaatgtattaaattacttagaaatacgatagttaaaaaagaaagtagccgacttaaagtatctgatttaaataatcaaataaagagaaagttgagtttaagtagccaaaatattaagcaactcgtgaagttaaattttgatactgataccgtgcttaaaaatggatatgaatattggattgacttagattggaaaacgatcaaagaagaaaacggtattatcccgataagcccgaatgataaagaaattaatgaaattgataatgaagatatacaagatgattgggtttcagaggaggatgacgagctatgaatcaagaacaacttgatgcttttgtagaagttttattgcctatgatagaagaaagattgaagtcataaaatgagtgaggacactttgaatgataggttcatcttcgaacctatctctttctcaaagtggtaaaagtgataaaaatgaaacgaaattataaatatatattatctatatgatgttacaagatcagtagtctgtagcaataatttaataaaaggagagcggtatgatatgaagggtaaaattgcactttattcacgtgttagtacgtcagagcagtcggagcatgggtactcaatccatgaacaagaacaagtgcttatcaaagaggttgtgaaaaactatccaggttatgactatgaaacttatatcgattctggtatatcaggtaaaaatattgaaggtcgaccagcaatgaaacgtctattacaagatgttaaggataataaaatcgaaatggtattaagttggaaattgaatcgtgtctcacgatcaatgagagacgtgtttaatattattcatgaattcaaagaacatggcgtagggtataaatcgatttctgagaatattgatacatccaatgcttctggagaagtactcgttacaatgtttgggttaataggatctatagaacgccagactttgatttcgaatgtaaaattttcaatgaattctaaggcacggagtggagaggctatcacaggcaggttgcttggatataggttatcacttaacccacttacacaaaaaaatgatttggttatcgatgaaaatgaagctaatattgtacgggaaatctttgatttatatttgaatcacaataaaggacttaaagcaatcacgacaattctaaatcaaaaaggatatcgcaccattaatcaaaaaccattttcagtgttcggagtgaaatatattttgaataatccagtctataaaggttttgttagatttaataaccatcaaaactgggcagttcagcgaagaggtggtaaaagtgatgaaaatgatgtgatattggtcaaaggtaaacatgaagccattataagtgaagatgtatttgatcaagttcatgagaaactagcttctaaaagttttaaaccgggtcgacctattggtggagatttctacttacgtggccttattaaatgcccagaatgcggaaataatatggtatgtcgacggacttattataaaacgaaaaagtcaaaagaacgaacaatcaaacgctattacatttgttcattatttaaccgttctgggagttctgcttgtcatagtaattctatcaatgctgaagtcgtcgagcgtgtaattaatgttcatttgaatcgtattctgtctcaaccagatattatcaagcagattgcgtcaaatgtgatcgaagaactgaaacaaaagcatagtaaccaaacagaaattaaatatgacattgatagtttagaaaaacaaaaagctaagcttaaaacacaacaagaacgattattagatttatatttggatgaggaaatagatagtgaaatattgaaagataaacaaagtcaaatgaatcaacagttagaagtattagatcaacaaattaaagaagcgcaacaagcaaatcaatcacaggatgaaatacccaattttgataaattaaaaggacgactcattttgatgataacacgattcaacgtgtacttgagaaaggctacacccgaagctaaaaatcaacttatgaaaatgttaattgattcaattgaaattacgacagataaacaagtaaaacttgtaaggtataaaattgatgaaagtcttatccctcaatctttgaaaaaagattgggggtctttttttatacctaaatttaactttgtgataaatgtcacaaatgaaaataggattgaaaatttatcacttttaccacttttttagagtgacaaaagtggaggaattttgaaatattttatttatggagtacaaattattaattaaggaggtcattataatgacgctaagcaaacaacttaaaacgtatattactgaacgatttaaattaaattatcaagaaacttgggcttgtgaaaccgtagatgcggtggctgaagatgtattacctgaaaaatatattaaaaatagtccacttgaacataaaattttaaatacttttacctattacaatgatgaattacatgaaatcagtatttacccttttttatgttatctagataaggaattagtagcaataggttatttagataattttgatttagactttatatttttaaatgacactcatcaaattattattgatgaacgctacttgttacaaaaagggggcgagtaattatgaactggatcaaggtcgctcaactatctgtcacagttatcaatgaagtcattgagatcatgaaagaaaaacagaatagaggaaaatagtatgaacatcaatcgatacatcacaagaggaattaataaaagtattccactagaccttcaaaccttactttggcacatggtagaagaaaaagataaccagcctcataccgattacctacacattttcaaactacaagaagatgataatatgttgtcaattacacatgaacaagagcagcccgcatacaagttagaatatcactatacaaactatgaaaaaaatcaaaatgcattacctaagaaagtctacgtcattcgtgaagatgacgtggacgatttttattatgtgatgctcttacctgaagaatactagaaggagtgacaaatatgaatacaatcaaaagtacgatccacacagaagcgatttttagtgatgatgaacaacaccgatacttactcaagaaaacttgggatgaaaagaaacctgtttgtacagtgataaccatgtatcctcatttagatggcgtattatcactcgatcttactactgttcttatactcaaccaattagctaattctgaacaatatggcgctgtatatcttgtaaatctattttcaaatattagaacacccgaaaatctcaaacatatcaaaaatccatacgatgagcacactgatattcacttgatgaaagcgataagtgaaagtgacacagtgattttagcttatggagcttatgcgaagcggcctgttgtcgttgaacgtgttgaacaagtgatggaaatgttgaagcctcataaaaagaaagtcaaaaagctcattaatccggtaacgagtgaaatcatgcatccacttaaccctaaagcacgtcaaaaatggacattgaaataaaggaggattatctatgaaccatgaaactacacaatcagactggcgaacagtggctagttgcttagcatctcaaaattatatatctatcataaaaggactagtacatcattttacagcgattgaagatgaagaaatacttgataaaatctatgaagattttatgaatgatgactctatagcaacggtacttaataatgatttgcaaacaattattaaccaatatctatcaaaataaaaacctatattctaataaaactagaacatccttcacttttgcagtgaaagatgttcttatacctatttttttactaatttcaccttttatatatttaattttctaaaaatattagatttttaattaatataataaaattattttatatactcagtaacatcataaagtttataagatgttactgagtatcttattgttgtaaattggagacatttttgaggttacaaaacaattgaatttatttaattctcaacaatacgaaatattataaataaaaaatcagtaaatgaatttatattaaactcatttactgacaattcatatcctaaactgttttattaataggattattgtaaatctgatttttcggagttattgttgttattgttgtttttatttttttgagcccattcttttctagtcattacatcgtcaacttgcatgttaacttcaacaacctctataccagtcatatatttaacttgttctttaactaagtcagttactttacggaagatttttggagctgattcaccgtattctaagatgacttttaagtctacagcagcttgtttttcaccaacttcaacagaaacaccttgtgttacgttattaccacttgagaaagcgttagaaatactatcagtgaaaccgcctttcatctctaagatacctcttacttcacgagcagcgataccagcaattttttcgataacttcatcagagaaagttaatttattttcaaaatgttgttggttattttgacgttcttctctgtattgttgtgcttgttcttgacgttcttctctttctttttcatttactccagtttggttattatatgcttgcttagctttattattatcttcagccattataattctccttaataaagattttgtttttaataattaatttttattcatctgaatccttttacaatgacgtttaactccatcgatttaaaaagtccatgaaatcttgtttacagtcttttgtatacccaataccaactcctattaaacataaaacaataattaaagttgttttccagaaccctaaagtcagaaataggattgctataattaagaatacaaagaaacctataatccgccatgtatataattttaggaagtcgataatttgttgagtaaaatcttgactatcttgattattatcagtcacgttatccctcccttatagtacgtgttgtccagcagatttttgatctctaatattaatttctaattttctaacaggcatttcagtaaaatgctcaacattatgtttaatgtcagatctaatgctctcagttaatgattttacttgcacatcattaggcactaagaaatcagctttaatgtcaatgtaagaattgtttttcttattgtaaagtttagtaaccacgtttggttgtctgatttcatcgtatttagttaatgtatcgtatgcagatttttcgactgctttacgtgatacataaatatgtccatcattataatctttataaagacctggttttctatatgttggtttaaagatgctaaataccaatataataccaattaacacgagtaaagctgataaaccgattaataatggttggaaccaattgaattgcaagaaataatcttgataacgtttaatacgactatcatctatgtacataaacagtaagaaaccaacaatcacaactactaataggccaaggataaagtttttaaatctatgcacctctaaacacacctccttagttattattaaattatagaattaaaagaatcttaaaatttttatttaatttttaaatatattaaaattcactttctaaattttaatgttcccaaatttaataccatagaaacctattttttataattattttcttttttgaaatcgttttattttgtgatgtaaattatctttgtttattaaaatatttctctttaatatccgaagatatttaaaatatataactatatttgtttacttgaataaaatacatgcttattgaaactatagaatatttgatgctatctatatcatttaaaagcattcgaaataaaagagaaatgtgaagaaataattcgtcacgcattacctaagaaagtctacgttattcgtgaagatgatgtagacgttttttattatgtgatgcttttaccagaagaatactaaaaggagtgacgataatgagtacaatcaaaagtgcgatacacacagaagctatatttagcgacgatgaacaacaccgctatttactaaaaaagacatgggataacaagaaacccgcatgtacagtcataacgatgtatcctcatttagatggcgtattatcactcgatcttactactgttctcattcttaaccaattagcgaattctgaacagtatgatgctgtatatcttgtaaatctattctcgaatattaaaaccccagagaatctcaaacatatcaaagagccttatgataaacacacagacatccacttgatgaaagcgataagtgagagtgacacagtaattcttgcttatggtgcttatgcgaagcgaccagttgttatcgaccgtgtcgaacaagtgatggaaatgttaaaacctcataaaaagaaagtaaaaaggcttatcaatccagcaacgaatgacattatgcatccgcttaatcctaaagcacgtcaaaaatggacattgaaataaaggaggattatctatgaaccatgaaattaaacaatcagattggcgaacggttgctaattgtttagcatcacaaaattatatatcgatcgtaaaaggattagtacatcatttcacaacgattgacgatgaagaaatactggataaaatctatgatgattttatgaatgatgactctataacaacggtacttaataatgattttcaaaatattattaatcgctatttaatttttttgctattttccattatatatatttaattttatttaaaatgtattgtacaatttaaaatgatggagggatatttactttatgaaaaaatatataattagtttagtacttttaacttcttttttactatccgcttgtacaattaatattgagcgcgatggggaaaatagtgagaaaaataaacagaaagaaaatactcatactgattcaaataatacaagttcgaatgaatcagatacttctaaacaatcatctaaagaaaatactataaatcaaacagaacaaaatcaaccagctgataataattcaagttcacaacaagacctacaattaatcacagaaaatgaagctattcaaaaagtaaaagatgagtttccacctatacgcacaggaaatgactatcgtatagatactactagagctgataataatgtttatgctatcaaatttacttctcaagatgcagagggttatcctatgaaagctgctgtcactattgataagcgaacaggagaatttattgattatattgatgatagaagcgatgaagataaagagcgtcatgtccaacatgctaaagaaagtactctttataaaggtccatacgatgctttcagaaaagattttagtcataaaataaatgaatgaagtatatatgaattatcatccttaatataagagcatccttcactttgcaatgagggatgctcttttaatttattttttattgattactcgccataagttctgcttgctcgacaacttgttcgacagccatcttttgtaaatcagggggataaccatatttcttaagcaatcgtctaacagctacgcgcattttagctttggcgctatcacgtttagaccaatcaacgcccatgttttctttcactgttttagttagctcatgagcaatcgcacgtagttctttatcttccatcgctttttttgctgtttcatgtgaaactaaagcatcgtaaaacgcaatctcatccgaatttagacctaattcatttcctcgttgttgctcttgtttaatatctttagcaagttgaatgagttcttcaatcacttttgatgtttcaatggaacggctattatatttattaatcgaatttcctaacatttcagagaaacgcttagataccgtcgcattcattttcattaatgatttgacttgtcctttgagtaatcgatttaataattctaccgccacgtttttctgtttcaatccttcgacatcttttaaaaagtcatcagataggattgataagtcgggttgttcaagacctagcgtttgataaacatcaatcacatcttctgtcacaacagattgtgacaccaattgattaatcccagcttcaacttctgcagatgttttacgtatttttccttcttttgatggttgtaataatttaacaagtcctgctttaactgctttaaagaaggcaatttcatcattgagttcttgggctgtaggttcagtcgcacaaagagcaaaggctttacctaactctgtgaccgttttaataaaacgttggcgttcatcttcgcctaaaccaatcacataatccatcgtatctgaaatagtataataacgttcagattttttctctgaattaaatttagaataatcaagattatataacatatcttgaattacatcatacttcaataacatcaattcaaccgctttatctgtatctattgccgtttgagcttgatcagattctgtatattctttaagtgcctctttcaaactttcggcaatacccacataatcgacaatcaatccacccggtttatctttaaatactcgattaactcgggcaattgcttgcattaaattatgacctttcatcggtttatcaatatacatcgtatgcatggaaggaacatcaaatcctgtcagccacatatctcgaacaatcacgagttgtaattcatcattcacatctttcatacgtttttctaatacattacgacgttttttaggaccaatatgtctttggaaagaagcaggatcactagatgagcctgtcattaccactttaataacacctttatcatcatcatccgaatgccattctggttttagacgaatgatttcatcatataattcaacagcaattcgacgactcatcgttacgatcattcctttacctttcatcgcttgctgacgtgtttcaaaatgttggatgatgtctttggctaaagcttctacacgaggttttgcgcctgctaaggcctcaatacgggaccattttgattttaaacgctgttttacatcctcttcttgatcttctgtaatgtcattatatgcttcgtctaagcctaaattttgaggtgaatttaatggaattacgcgactttcatagtaaattttaactgtacttccatcagctacggcttgtgtcatatcataaacatcgatatagttcccaaagaccatttgcgtatttttatccgttgaagctacgggcgtgcccgtaaatcctacaaacgtcgcattcggtaaagcatctcttaaatacttcgcataaccatatttaatgccttcccctttatcatcgtattttgcattaaaaccatattgtgtacgatgcgcttcatctgccataacaatcacatttttacgttctgttagggcagccatggtcgtttcattttgttcaggttcaaatttttgcatagttgtaaatacaataccgcccgactcaacagataataacgattttaattctttacgtgttttagcttgttttggcgtttgtcttaataaacctttaccagaccgtccttttgatttaacaaacgtactgtacagttggttatctaaatcattacgatccgtcacgatgactaaagtagggttattcagcatttgaattaattttccagagaaaaagaccatggttaaacttttacccgacccttgggtatgccaaataacgccgcctttaccatcaccttgcccagatgaagctaataaagctctgtcaacggctttattaacggcataatattgatgatacgctgctagaattttactgatatgtcctttgccatcatcttgaaataaaacaaaatatcgaattaaatcaagtagtgtttcaggatttaacatcccatgaatcagcacatctaaactagctaaacttgaggatgattccgtttctccatctttggaacgccaagtcataaaacgatcatagttcgcagttagtgaaccagcttttgtattaataccatcacttgtaataagcacttcgttaaatgtaaataattgtggaacacgcattttataagtttctaattgatgataaccatcttcgacgcccacagtttcattggttgaatttttaagttcaatcacaacgataggcaagccattgataaagagtacaatatcgggacgttttgtatagtctccattaacaacagtcaattgattaacagctaaaaaatcattgttttgtggatgttcaaaatcaacgattttaacaatttctacaatcgattgtccttcatcatcatagtcttcgatttcaacaccattgatcaaattttcatgaaaagtaaggttattttctaaaaggttgggcgacttctctaatgttaactcatgtatcgctttttggataaaacgaggatgaatctttgagttgattttttttaatgccttttctaatcgttcatgaaggacaacatctttatcacttttacgttctggtgctagacccgtcatactaagctcattaccttttttgtagtcatagcctagcgattgtagccattctagtgcaacttgttctaaatcatcttcattaaattgaaagttcatcgctgttcacctcaatatcatcaggtatttctatttcaccagacataagtttaggaagaagcgtatctcgtaattcaattagctttttattttctttattaagtattctaattttttgaaaatatgattttatagaattttcgaatttaataatagtttctttatctgctattacaaatttaatgctatttagattttttttattaagctttggttgtacagctccagttatataaggagctacattagtgttctttaaataaagcattaataattcatctgaaataagctttccttttaaaatatgtgcatgattacttacccaaaatttaccccacacgtattgaataaaaggattatctgtttctgtttgaacagttccatcttctccaactaatatatattttccatcaaaaatataattatctacataatctatgatttttgttgctccataatatgggtgtattgattctcttttttctctttcaagttttgataatggctttctaatagaattaaagctttctgctgtttcttttacagttttgatagaccaatttttaggtatctctcctaattcactatcaatcatttctcctccactagatttataaggggcgctatttctatctgggaattcaaaatctataaaccaacgtttaaacaatgtttgtgatagttcctctaggtttgctattatttttttatttaaattaattttatcatctattttttttaaaatatttgctataaaattttgtatacttctacttggtaaatcaatacttaattcacctaaaactgatggttttattgaaggatatgcagaagtactattttctgcaatattttgtagataatttgttactttctctaatgttaaatatttatataagtaataagggttaactaagttttgattaggagttattactgcaaagcctgtagaaactatataattagattgcttatttgtaataaaaccaaaatgtttttgattaggcctaacagttgaaattaatatatcatttttttgtacaattcgtttcgccctactaggaattttgtcggatatcctatttaattttataatatctttaaattctccattaactaaattttttgtgtctaaatattcaataatattaggatgattatctttttttatggaatttttattaattttgcatagttttttaattttagattccataacctaacccctccagtgatttacggatttggtcttcaagttcttttgattttgcgaattgttcacttaattcagaagtaatacgttccatttgttgttcaaaaagttcttcatcttcttcaacgtcagctaaaccaacatatcgtccaggtgttaaaatgtattcattattcttaacttcttctaaattagctactttacaaaaaccagctatatcttcatatgatttatcgtttgtacctctccaagcatgatacgtttgtgttactttctgaatatcttcatctgaaaattcttttaatgttctagataccatatgaccgatttcacgagcatcaataaataaaatttcatttttacgttcttttttatcattttgacctttattattattaatgaaccaaagacagacaggtatttgtgttgaataaaagagttgacctggtaaggtaacaatacattccactaaatcatgttcaattagatttttacgaatttctaattcatcttttccacttgtagacatcgatccattggctaatacgaatcctgctgtaccattaggtgctaatttggaaaccatatgttcaatccatgcatagttagcattaccttttggcggaataccaaattgccaacgataatcatcaagtaatcgttcttgaccccaatcacttgcgttaaaaggtggattggctaatatgtagtctgcttttaatcctttatgtaaatcattatggaatgtatccgcatttcgttcacctaagtcattatcaattccacgaatcgctaagttcatttttgctaatttccaagtggtaggattagactcttgaccataaattgcaatatcatctaagcgaccttgatgtttttcaacgaagcgttcactttgtacaaacatcccgcctgaaccacaacatggatcgtaaatgcgtcctttataaggttcaatcatctcaactaataattttacaattgacgagggcgtatagaattctccggcatttttaccttcggcacttgcaaatttagcaataaaatattcatagactcgacctaatacatcttgtttacgactttctatgtcgccaactttaaatgtaaataagtcaataatatcccctaatttttctttatctaacgcaggacgtgcatattctttaggtaatacacctttcagtgattcattttcattttcaatcgcaatcatagctttatcaataatttgtccaatttcaggtttcttagcattatcattgatatattgccatcttgcttcttttggaacccaaaaaatgttttctgctaaatattcatcttgatcctcttcatcagcataaggatcttgcttcaattcttcatacttttcttcaaaagaatctgatacatattttaaaaatattagacctaatgctacatttttatactcagcagcatccatacttcctctcaatttatcggcagcctgccataatttttcttcgaaacctataattgccattaataacacctcttaaatatttttaatttaaatatatcaaaatttaaatattatatgcttgtatttttaaatataataacattaatctaagtgttatttttttttgtttaaagtaatatatatttcttggaacttagacgttgttttttgaaaatttggttcatctagttcttttaattttctaataatcaaaagatttaatgcatacttattaatgtgatatttagagtctttttttataatatttttcttctcaattgcattttcgaaagacttgaaattctggtaactttccaaatcttcttttaaggtatctgaaatttcatcttcaattagcaattcagagatacactcagtaataaattctttctcaaataaatcttcaagttgtattgagtattcatcttcgattttttcatccaaatttgactctttgatagatttattattatttaaaattatcctgttattataattactattaaaattattttgaattttttttgccatttccattccttttttatcatagtctagaactcctagtggtggattaggaaatacctctttatacacagtaataaaatctgaaattttattagctccttctgtttcaatgaatgttaagctctttttaggaaataacctgtggtagatgtattgatgaacaattttatcggttttaccttctaccataactacagtcgaattaatgtttattcttaaagtatctaataaatttatacccatgatttgatttatttccaatagtttgactttatcttttttattgtaatcgatatatgttccttgtaaaacatctctttcgattagaagaatgttatttatatcagtttcatttataaaagctgtcgagtgggtactgataattatttgtgaatttttaaatacttcttgaatctttttatataaatatctttgggcttctatatgtaaatgaacttctggctcgtcaaagagaataatatctggcattttattattttttacattgtatttattaatataatacgacattattattaatttttttactccattacttttttcattaattggtgctgtatcgccatagcaatctgcaacatataattcattattaaaaattaacagagaatagtagtccttacttatagctaataagtctctatttatattagataataaaattgcaacttcattattatctaagtcatcaaaaaattgaactatctctattattgattgatcaagagaagtattattatctactttagctattttaattcgtttatttacagcttcttttgcgctttcgttatatattgtattagtattattatcttcatattcaatagaatgtttatttttattattaagagtaataatttgtttattacttgttgagagtatggttttaggtaattttctttcaaaattttctaatctacttatactttggaaagctgtatctaaatttttaacatctaatgattcaaatattgcactaattatatttgatttacctgaattatttgatcctactataatattcaaatttctatttaggtttagttccaaatgttttatagatttataattataaatttctattgtttttagcgaattcatatattttttatgactccatttctttcataattaattatagctaaataaaattttgtatattatttagtataacagaacgtgaataaatctaattgaacagtaataagcaattttttaaattcattttttttagtagtggtgttgatattaattgccaataattaaaaataaaaatcaatgttaatttaagttactaaaaatattggtttctttaaagagaaatattaaatgtgcaataagatgtataaatataaaaagagatttattaactcgactaaaccttctactatattcgattcaaatggtaatgaaataggagttgttcaaaagtattataaaaacatattcgaaaaaattataggaaatgtatcttttgggcacttttttgaaagatatctttttaaggatgagaatgacaatatcatagtaatggctaagaaaacaggaatacaacagaaaaaaattatagattaacatattttgaagttaattctggagtatataacgaaatacacttaaacaatgaagaaagatttaataaagaaaaattagggttgttcaagtatgaagatcaacttttttcagtaagtttagataaaaaaattttgtaaaatggtagacactcaggataataaggaagtggctagttggagtcgcaaaggggattacatttacattaaatttaaaggaggttttgttgaaaagcacaaaatatttacgattgctattctccatactttttcaaataataatattcgatattatcgtaaagataaaggtccagtatatttaggaccaccaccattataaataagcaaacatagtaaactagtataacattaaatagcccccacaaatttaagttttggctcaactttgtgggggcttcttaataagatatactcttagtgtttcattttcctttttaccttaatggtaacttatagctcctaatgatttatagatacaatagtatttgaattctttctcaattatttttttaaagttaatatcttcttaaaagtaataaagagttatttgagttttgaaatttttagtcatcttcacttatatttttagtttttttaaagtgtattttaatttcaaatataccatttttatatgtggcataaactagcccatcttgttttgcaactaatttttttactatatataaccctattcctgaatgttgcttatgacgacttaaatcagcgatgtaagaacgattaaaaatatatttaatgttttcttgagttagttgttcatctgtatcgttagctaattttacaattacgtcattgtctttttcgtataaatcaatatcaacaaagcttttactatagcgtagggtgttctgaattaaatttgtaaatattctatttgtcgcaaattgatctaaaacaacttttgaaacttttgacaaattaaagtttacatcaatattttgatttttaaattcactataataggataaaaagctatttttaagttcctcacttaaagaaagttcttgaaaattaagtttataatctaatgaattaattttagttatttcatgaaataattctactaagttaataagtgaagttgttttatcctctattatgcctatatatctttttttctctttcaaagtagtatgaggatcattaagtaaatctgtgtatcctttcacagctgttaaaggagttcttaaatcatgagaaatgttagtgatttcttggtttaacatcagttcttttttcttgttaataacatttcgttttctatatatagtaagtattgaatttatttcattacacaaatttttggaaatattgaattgtgtggaagtacgaataacttgattcgaagtgacatcattttttaagtcctgcaattgtatagtcacttgttttatttccatgtataacgatatatatttataagctaaatatattatagatagtattaaaattaggaaaaaaatgtatatcatttttagctatcctcacttttagtttagatatctcgtctttttaattatcaaatttcctataattaaaaagactacccctaaacctataccgaccatccaacactctaaatgaataacgcttgtatctgtagcgtattcttgaaatattttttcaaaaaattttgtaggagaataattgtatagaataatccattttttattaataaattttagcagttctaacaaaccaccaccatagtaataaataaaaatagttaagagaacagaaaatgcaccatttatttttaaactattcaataggtgagataatgctaaagcgccaaagattaaaggtgacatattaattaatgagattataaaattatttaatgttttatagtcttttttaaacaaaagtgaaccgaaaagtatacttatgatagtacaaattaaacataatataaagaaataaaagagaaatattataaactttccgtaataaatagtatctaatgaaatatcgaaagaaatgctttgttttactatgtttttgttctctttattgttgactattaaattcattgctgaaccaatggcaatgataaagagtcctgaggaaacaatattaacaagaaagaattttaaattagcgtatgggaatttaaaagtagttttatcaaagtatactaatgtaaaagcggctaatataattagtgttgcacatattattgtgtataaatatatgcttttgctatgtaataatctataattctcacttttgatataattaatcaatttcatcacctcttttaatatttaagaagtaatcttctagattagatacttcaattttaaattcatatacatctatattattttcaattagtatcttattaattaagttataatcaatcgaactttgatatacaattatttcttgcgcattaattaccctgtaatcaatagtttttatattttcttctaaaacttgagaagtttttgatgtattatcaacgcgtattaacagctgctgtttactttcttgggttaacttttctttactaatatctttaataattttacctttatcaatgaagacaaatctatcagctacttgttgcaattcatttaatatatgactagacaaaaggaaagtaataccgtgttcttgatttaaccggagaattaaattcctaaagtcttttattccctgtgcatctaatccgtttattggttcatccaaaattaataaatcaggtccatttaatagagctaaagctaatcctagcctttgtttcatacctaaagagtatgttttaaattttttattaacgttttctaattccaccgctttaagaacttcagtaatatctttagtatttgaaatacctctttgaatactaaaatacttcaaattctgaaaggctgtgaaattattaataaaattaggatgttcaatcatgaatcctattcgcttacgcatttgattttttatatcggattttttattaaataattctatatttccactatcagctttaatttgatttgctaataatttaaaaaaggtagatttaccagcaccatttctacctattaaagcacaaacttcacctttatgtagttcgaaatttatcggtaataatccatgattgtctttatattttttacttaagtcttttgttttgattactagattcataatattcgcccctttccaaaagacaatttaagtataaatggaaaggtcttaaattcctttaagtaaaatataaagaaagtataaagaaaattattctattataaatccaatcccccatacagttttaatgtaagatcggttagtataggtactcaatttttttctaatatttgatacgtggacattaaccgtattatcatctcctaaataaagcccttgaattttttcataaatcttttgttttgatattggtttttcaggagttttcattaataagcacaaaatattatattctttatttgttaattcgattttatttttatttaagtaaacatttctagtcgatttatctatacttaattctttccatactaataaattttgaggtggagattgatttaaatttcttaattgaacttcaactcgtgcagataattctttattattaaaaggttttgttaaataatcatctgctcctttatttaataatcgaactttttcttcaacttcagttttagctgatacaacaataattctgctcattaagtgtttttttatataagtgagtaattcttctccctcaatatgaggtaacattaaatctagcaatattaaatcgtaattatgtgtttttaaatactctaaagcttcatttcctgaataaactatagtagttttaattttcatttttgttaatgttaatgacaaaatatgtgcaatatctatatcatcttcaataattaaagcattatattccataaacctaagtcctctttcttcaattgaagtttttaattatattatatatttttatatgtattatttttagtaatttccttctatatataaaagtaatattttacaaatattgataatatccttaataaatcaaagtaaatcaccttaatagtttacaaaattacatcaaataatgatttgttagttaccttaataaaaactaaattttattaacgctacgcttaacgttctatcaataatactcaaaagcaaaatatataatataatctattattgtattattataataatagatatagaaaaaactacagtaagtttagataaaaaagaacgttgtaaaatgatagatacaaaagacaataatgaggtagctagttggaatcaaataggagattacatttaccttaaatttaaaggatcttttgttggaaaacatgaattatctatgattgctattctccacacattttctaataataatattcattataatcataaagatataactcgtccctcaatgggtccaccattaatataaaatacagtgctttggaagaaatatgtatctttatgtattcaatccaaacaaatattcaacaagtaatttagtttgaatgcaataaccccttcattaaaaaaatagtgaaggggctttttgaattaatcattataaatagttatgtgattttatgctctatttaaaaatatttttaaacggtcatatcatgtcgctctaaatatatatattaatatagtaaattaaataacaaaggattgattaaatgataagaaattatttttctaccccaaaaatgccaatattctttttctatactccttataccattgtgtatttagttaaatttatattcatgatacaaaatgaaacaacaagttggattagttgggtatggaatatagtaatatttttacttggaagctatacttatgcttggttaagttcatacatactagatactaaagacaatgttcttttacgttttttctttatgaaaagtgtcttatttagaaaaaagtttggaactattgctaaaatgacttttgatactcatcgtcgaataaatcctacgtttaagcaaaaaattgaagggaataaagtagattttcgtgaatcttttgaaacatatattaaaggcactttttttagtttcataatagttattattgttaaatttattttagcatggatacttcatccaatattttggatttcaattataatccatccaattattatgaaaaaatatcgtcagaaaatatcagaacatttggcaagcgaatagtataaaaatatcgaatagttttaaattgaatatgggagctaacacaaaagagtgatttgctcccaatatatttatatattagttatgtcggtatccctaataatattaaattcactttcaattatatcttcatcgaataacctattagactgattctttataatttcatcattgaaatttcttacaaatcttgcattactgttaattctttgtttttcaaatacttttttaagtttgtcatcgtaaacattttcattaaattcatattcgtgtagtaattttttgccgattaaacataattcgtttatagaataatcatcaaatataatttcattttttattcgagattctaatcctggatttatactcatcaattcatccatttctttaggatacccagcgaatattatcatgatatttcctctattatcttccatgaattttaaaatagtttcaatagcttctacactgtagtcgttttcagatttgctgtataatgtatatgcttcgtcaataaataaaacgccacctaacgcagattttaaaactttttcagttttaatagctgtttgcccaacaaaaccggcaactaaatcttgtcttgtaacctctacaagcaaatctttttttattacacttttttgaaataaaatttgtgctattagtctagcgaccgtggttttacctgtccctggattacctttatatatagaatgtaaagaattatcttctactttaattccttttttctttttggcttcatttacaacgtgaacgcgtataaaatcatttgcttgttttttagcatttgataaaccaactaaattatttaactcctccattggattagaaatgttatttttagctattggctttatttcttttgtatttttattttctacatcttcttcatttttagtattttcaatatctttcttttcttcaaataattttataatgtttatttctttatttgattttatggatgagtgtttatcttgaagaaaagtattaaaaccatttgtgacattataattattaattgcgatattagaatttaataaataaagatctgttggagttacattagaatgtaattcttgaatgcttcctttagaattacaaaatctaaaatacattttttcattaaatttattattcaatattaacttttcaacatccaatgttgagttttttgtaactgcgatgcttgacgtttttaaagaagtagcttctaacgtcccttgaccaagccctatttttgttacttcagaattttttattttagctctcccattatcaaatatttgaagcagataatttttttttgaatctaaaggatctttataatcaatataagaattatctaaatctagtaaagaattgttaattgaaattgagggataagtagcatcaggatttaaattagtatatacaataattttagaattttttatattaatttcggaattatctttcatagtccattgatctcttgaataattgttgtacaaagagcaattagatatatgccatttgctttgacgagacatagctgcaccatgaatggtactattttctattacattgattcctttagaagaactgtgtagagaaaagatacttgaatttttaatccgaagattaccattgctattataaatattaaatttcttaaaatctttatggaaatttaaaaaagaaatattatcaagttctaacgaaccattttctatatcgaagacatcagtattattatcgttatctaaaatgatatttgatatggataaataccctttaatttcaaacctaaaattctttaaagttttcttttcgtcatcgatacttgtaatttttatatccatacctttgggtatttcaaaggagctcatagtttctttatttaagtctatattgtcaattaatattgtatccccatactgtgcattcgttatggcatttgtaagcgttgtttttagaaagccatcgcccactttaattattcttcccataattaatcctccttatatttagaaaaaatttataaaaattaagtagttatatcatactgattaaatatttctagcattctttctagaaaactatccacataagtttgtggggcgagtattagcgcatgtggtgccttttgataagcaatgtagaaagcatctagtttagtacatgctatttcaaaaatgagccaatcgctttctttatctacgaattttgcctcttcttcatttaatggacgttgacattgcacatcatataattgaaataattcattacttatatttttatgtactcttacttttactaattcattagcttcagattttttctttgaatagttttcatcaatatatacatctgataaatcacgaactttaacatcataaaactcatttccaagttcataggtaaaccaatagtcgtaattcatatacattaacgaatgaggtgtagcaaaaaaagatttttttgtgcttttttgcttaaatccaaccattttttctttaattaaggctttctgaagcatcattaattcttgacctggaaaaatatcatcataagctttttctcttatagaaaaatggtttaatatagactttaatgttgctacgtcttctgctcttccatttgaaatgagttgaatgaacaaattatagacattcctatgtagtttaggagttaaacttttaatgctaagcaataaccctaaagttgcataactatcataattaaatgaattgttttctatttgataataagcattatcatttttaccggttagctttatttgcgtattactgtcgtaccatggtagttcaggatcagtaaaaaaacgattaatagcgtccatatctcttcttatggtacgagatgtcttcattgtttttcttattaattcagaacgatttatcttttctccattaatcattaacagaaaaaaatataataaacgtttttctttttccataacttttcacctctataaatgaaaatacatttataaaaagacatatattgtccgtataaaatggtttactgaatattagaacaaagttatagatagataatataaatacatgtaagtaataagactttatgtgtctgattgattaaaaacgaatggagcgattaatatgagtgaaaaattatggaacgaatttgaaaaattttgggataaaaatgaaatagaaagaatggccgaagaatatcaatatttgtatgaacatccagaaaatacagatgacttttgttgggtgaatgaaaaggacaaattgaatacaaactcaaaagcaatttgttggggtgttcctaatcatattttaggagatatagacaaagcgaaggtaattgttggattacttaatcctggaactcatatggaaagtgaagtatcagagaaatgtgatacagtaggtaaatatattaaagaagaagtaaaaatagaaaaaaatagttcaagaaaagtggattctgagtcaaaagaagtttatcaaggtagtgtaaataacaaaaaagaattacataaattttattgtgaacatattttatccaaagaaaatgtaatttctaaagatttaaaaactttatataaaatgtataaaaaagatagaggaaatttagaatattatttgaagaataatgatgagtatgactttaatttaatagcatattatttaggaagttactattcaaaagtttttagtggaaaagaatcaatgtataaagaatgtataaaacattatctttctatttttgacaaaatgaatcaagctgaattacttggatatgaagttgaaaaagaatttgaaaaagcactttatgatattaaagtttctaatattgaattcattccttatcgctcatttgatagtaaatcgttaagaaatttacacaatttagaaagcagcaacttaagtgcaaaaattcttataaaaaaaatcttaagtgataaagatacaattgttattttaagaagcataaaagattggaaaactttatttaaaaatatttgtaatgaagaagggattgattttgaaaaagatatcgcaccagcaatatataaatttaaaagtcgaacaggtgcaatatctaagggcaacatagctccttataaagttgaaaaagacggaaatattaaaagtgtagatgaggtaattgagaaaatacgtgacataattagtttaaaagattttgaagcttatttagatgatattattgccaataataataaggggtgtttttaatttatgacagcaactacaaataatgtaatagaatataaaattacaaaacagtgcaaagaagcatttgagaatgtacttaatttaatcgcgaaaaaagagcgaaagattattgaaacgcaagatcttcttctagcttttgcttctactgcagatactggagcggcctattcattaggtcgtttttctataaccaaaaaaaagttagaagatgaaattaaacaagcaaaattaatggataaacgttatatagaaataaatgaagatgaatttgaacaaaatgatttatttatttctcaaaaaaagaaaagaaaaattcaagaatatataaaaacaaaccaggtacaatttatatatgaatcatcaacagaccaagcaataaagtatatgtcagaatatcctatttcaaacaatgtaaaagatataattgattttgcggaagagatgagatttcaaaacaatccaagcggtgggatagatacctattggattatcatgggaatgtctcaagatgaagattgtaatgcttatcatgttttaaaaaaattaatgttaaaatatgacaatatatttgatggcgataaaatgtcagagcgttttcaaaaccgtagctatttggcaaataattattatgatggaagaaatgaagaagagcaacgtaagaatgctacaataagaaatcgaatttctaataaattagcagaccctagttattcaatattagaagatattactacagatttaactgaaaaagcgcgtaataaagaattaatgcctgctattaagagagagagagaaattcatcatatggagatagctttatctcgtcgtgataaaaataatgttagtttaatagggaaaggtggggtaggtaaatcagctatagttgatggtttagccttaaaaatagttaataatgaaataccatcattaaaaaataagaaaatattacaatttagtgttaatgatttaatttctgtaattcaaggagaaacttttaaaggtattcaaagatttatgtctgaaatgaaaagagagaaagatgttattttatttgttgatgaaatccacatgttgggtaaaagtaaaggattaacagatattttgaaaccagcaatggctagaagtgactttcgtataattggagcaactactcctagagaatggcaaagttatatatcatctgacacggcattaactagacgttttgaaattattaaaatagatgagcctaatgtagaagataccgtagaaataataaatcaagttattcctatttatgaaaattttcaccatgttaattttgaaaaagaaacgattaaacttgcctcacaactaggaaaaaagtattttccgaaagaacagctaccagacttagcgtttactattttagataatgcaggagcaatttgtcgaattgaacaaggacagactaccaatttacaaactccttatttagataaaatgaatcgattaaaagaagacttaaaacaagctcaagtaaaagaatttaatgataaacaggttgaaaaattacgtcgagaaatacaacaacttgaaaaaaactattcacgtaagatgagcaatatagaaaaaattacatttgattacttagttactacagatcatataaaaaaagcaattgaacaaagattgggtgaaggatttgaagtagtcgaattaaaagaagatgaagattattctgatattgagattgatcgcctaagtcaattaaaagatactatgaaatcacaaattattgggcaagatgaagctattgagactatagcaaatgcagtaataagaaagaaattaggctttaagcaatcaaatcgtcctgtgggcgtatttatgcttttaggtactacaggagtaggtaaaacagaaacagccaaaatattaaataaaactttatatagagatgaacagaatatcattcgatatgatatgtcagaatatcaaaaggagcatgaagtttctaaattaattggtccaccaccaggctacattggttttggtcaagacggagacttagtaaagactgtgcttgaacatcctcgtgcagttattttgtttgatgaaatagaaaaagctcatccgaaaatatttgatgtattattacaagtatttgatgatggtagattaactaactcattaggtgaaacagcagattttagtgaaagtattattttattgacctcaaatattggagctagtgatattcagaatcgaaaagtggtaggtttaaatcaaactaataaaaatggaacagactttgaaatgatagatgaaagtattagagaagctttaaaacaatattttagacctgaatttttaaatcgtattgatgagatgattacttttaaaccacttaaccaacaagaaatttttgaaatcacacatctattgattaagaaagaagtagatttaattgaatctatgggatataatattgaattttcaaatgaagcgattagattgattgctaatttgtgttatgaacctaaaaacggagctagaccaataaaacgtggtatttctaagttactagaggatcgtctttcggaagaaataataagtggtaccttaaaaaaaggaaatactataaaagtaactgaatataataatgaattattgatagattatatttagttacaaaaaagacataaaatttataactataaactaatgagcctgggatataattcctaggctttattattatagtattatttagcaaaatcactgataaggagaaacgtaccataagggataaggtttttagtgtattaagaaaaaacatgtagatattatgttaagcaattttgtgtttaagattgtttagggagttattagttcttctttaatattatatgacacttcacaaaatagatatattagatcagatgttcatttgatttttaggtgattattaaataaaattgcgactaatcaaagtgaataatcgttagagaatcaattgcaacagttggacggtttaaggtattgacgtaacttgagtaccatgtacacagtatactatctcgatgattacaattttttctcaataaaaataaaaaagtatattaatttagcataaaattgataaaatagagacgtatatatgagaaattgataggtgatataatgggaaacttattaaaaatagaaaatattaactattcactagaggatttagataactcagtacgtaagtggaatatttcagcaaatgggaaatttttattgagatatccgactgtgtatatcattaatgacaaaaagagtgaaaataattttgaagtttatgtgggagaaacagctgatataagaaatagaacaagacagcatctaaatgctgatacgaaggtgaaatcattttgggaagatttttctgaatcaaaaaaatcatcaatgtatgtgattggtcatgaattatttaataaatctttgactctcgatattgaaaatagattaatgcagtatttgttgagtgtagagaatatatctagagttcataatagtagaacaaatcaacaaaatgaatattatacatcggaaatgcttgatgaaatattctctgaaatatggcaatctttaaataaaaaaaataaatcgttatttcctatagaaagtattattaaagattcagctatattcaaagcatctccatttcataaattgacacaagaacaaattaatgctaaagaagaaatactaactaaaattaaagaaagtatacttttaaatgaagatggacaattaattattgttgaaggagaagcgggctcaggtaaaacagttctaatgagtacattactttatgaactaggaaagtacaatttggatttagatgaaaatttagatattcatcttttagttaaccataatgagcatgtttctatatatagtcaaatagcttctaaattaggtatagctaataaaaaaaataaaattgttcaaaaacctactagttttattaataacaactcatcagatgaaaaagtagatgtagttattgttgatgaagcacacttacttttaactcaagggaagcaaagttatcaaggtaaaaatcatttagatgatttattggcgagagccaaggttgtggtaattgtatttgatataaaacaagttcttactactgaacaaatttgggaagtagataagttgaatgaatattttgataaagccaaaagtaatagtaaccatgtaacattgagaaatcaaatgcgtataaatagtgatatttcaactgttaattggatcagaaacttagttgattatcaagtaataaattctatacctaaagataaattaggatatgatattaaaatctttgatacaccagatgagttagaaaaagctattaagataaaagctacacatacagatagtggtatatcacgaatgcttgctacatttgattggaagtatggaaccaagccgcctaatcatgaagacttttggagagttaaaatcggaaattggtccatgccttggaattatcaattaaaagctaatagaaatcaagttagcttaccgtgggttgagcaagatcaaacaattgatgaaataggttcaacatttactatacaaggtttagatttaaactttgcgggcgtcattataggaccttcagttaaatatagaaatggtaaaattatttttgacaaaagtgagagtgctaataaaaaagctacgcaaagaagaacgttaaaagacggatcaaaacagtatttttcagaaatgcttttgaagaatgaattaaatgtcttattaacacgtggtgtaaatggcttatatatttatgctgtagatgatcagttaagagaagcgctaaaaatagcagcaatggatgaaattaatgatattgtgaaagaaattaataaatttagagatgctcgtaactggagacaatttcataatgagaaagatttatcattgtccattactttagaagcagctgagttattggaattattccaatggaaaacatctgatgaagtagtagaaactaatcgtgaaaggttagctgaagaaatagcagatgttttaatatatagctatatgttagcagacaatttaaattttgatatcaatgatattatccgtaagaagttagtgaagaacgcggagaagtatcctatagcaaaaagtaaagataacaaaattaagtataatgaaatgtcttagaaatttggtttttaaatactttaatattttcaaataaaaattatcaatcccagaaactcctcatattacctacacattttcgtgtgggcatggtggagagtattttaatttaaactttatcaacataaaatcacacctcctgtttttcttcatcacacagttgtggatccgttctgttgcaaagttagaaaaatatagctaattaccattttatcatgtcgttgttcccttaactggctaacatatgcctaatttcgtggcatggcgaaaatccgtagatctgaagagacctgcggttctttttatatagagcgtaaatacattcaataccttttaaaatattctttgacgtattgatactttgatatcttgtctttcttactttaatatgacggtgatcttgctcaatgagattatttagatatttcgatgtacaatgacagtcaggtttaagtttaaaagctttaatgactttagccattgcgaccttcgttgaaggtgcctgatctgtaattaccttttgaggtttagcaaattgtttaatgagacgtttgataaatacatatgctgaatgattatctcgttgcttacgcaaccaaatatctaatgtatgtccctctgcatcaatggcacgatataaatagttccattttccttttattttgatgtacgtctcatcaatacgccatttgtaataagcttttttatgcttttcttccaaatttgatataaaatcggggcatattcttgaacccaacggtagaccgttgaatgatgaacgtttacaccacgttcccttaatatttcagatatatcacgataactcaatgcatatcttagatagtagccaacagctacagtgataacatccttgttaaattgtttatatctgaaatagttcatacaaaagactcctttttattaaaattatactataaattcaactttgcaacagaacctaaataagtaatatcggttgataatacttccatgggacaactcgctttaaattgtctttgtaataaattgtctgttttataatacggtttacctatccttgtcgttttttaggtctaactcggcagttcaaatgatgcttctacataattatctgtactcttttatgattaattggtgatgtataacattgattaatcagtgctgtaatcttacgataaccgtaggtatagtggttagcttcacataattcaatgactttttgtgttacagtatcatttttataggttttgtttttccatcggtaatatgttgatttaggtatgtttaatacttctagtatcaatttgattgaatcgtttccttttaattgatccactaaatctatgactactgttggtaccacttcttttccaatgccttgtacttttttaaaatatccaattctatatcttttctcttattttctaattttaattgttctacttctgactgctcttctaatcctttaccgtaggtatattgtttaccaacgtgttgtgaaaatctataactttccccattttgataccatcgccaccaagttttcacttgtgttctatttctaatatttaattcttccataatttcttttgttgaaaatcctgctgctttcatttcaacagctttatactttgtttctactgaataagaaactcttttcatagaaaaaacacctccgcatgattcattttaatatgaattcaacgaaagtgtttttatataattcccactaattggggtcagtccaaatttaataaggtgtttttctatataaagtaaaaaatataaatgagggatgttatgtttgaattaatcgtaacagatatggatggtacgtttttaaattcacaaggtagtttcaatcgtgaaaagtttcaacaattattgattaaattgaagaatagaggtattcgtttagctttttgcacaggaaaacaaagtgaacgtgtagatgcgattgttggagatttagcgaaagatttatttattattggagacagtgcttcacgaattaaaattaatggaatgaatatctatactaaaacatttagcaatcaacttggatttgaagtgattgagacaattaaagctattgatgataatttagtaattattgtttgcacagatggtatggcttatgctgagaagcgtatttccgaaaaagaacgaaacatggttttaggttcatatgagaaagtaacttttgtagaaaatttaaatatgattaatcaagatattttaaaggttactatttttgattcacaaggtgagtgtttcgaacatgttaaaggtttaagtaaatatgaggataatctctatatcgtagctgcagaagagcattggatagatatcacacataaagacgttgataaaggaaaaacgattcgttttttacaaaacttattaaatataagtagtgaacaaacgattgtatttggtgatggtttaaatgatattcctttatttgagaatgcacgatacaaagttgctatggacaacgcttatccagaacttaaaagtaaagcaaatttaatttcaattaataatgatagagatggcgtaatagaaacattaaatacattacttataaatgacgataattgtagtgtgtgagtcaatatgtaattaacttttatacgataaaccgcatcattaaccgatacgcagaagcatatcataaatgatgcggttttttaatgattaatcaaatgtattgtgaaatatttatgcttggtcaatagtttattatatttgaattaaaaagtattatgtaaaaaagaaggcctaggaatacttagcaaagagtatttttaaaagcaagggagatgattttatgggcattaatattcaacgttttgaagaaaaggatgctaaggaaattgttaagctaattcatcgagcaatgtttgaaacgaacatctctgattattctaaagaagacttggtaaaagatgctgagaatataactgtgtcgtcaatcatcgaaagagcttcttggactcatttttatgtatttagagataaggagattattattgcgacaggtgcaattggtccctattgggatagtctaacagagagtagttttttcactatttttgttttacctgaataccaaggtaaagggattggaaaacttattattaatacattggaagacgatgagttttataagagagctagccggatagagataccagcatcaattactgcagttcctttttatcagaagtttggctataacttcaaggatggagttagtattactgatgaggaaggtatagtaagaatagagaaaaaactttgcgacttaaattaacgttaaaagttaaaaaatttttagtaaaattattagtcgtatttacagatgaaaaataataaatatactatatttaaaaaaagttcgttatttatctagtataaaataacgtgtccaatattaattattactaaattttgatatatttaaggaaagatcaagtttaggatggatgaatggcttatcagagtgaatatgcattagaaaatgaggtacttcaacaacttgagagtttaggatacgaacgagtgaacatacataacgttgaacaattacatgataattttcgtagtataattaatgaatgtcataaagataaattaaatgggaaacccctaacagatcgtgaatttgaacgtttaatgacgaggattaacggtaaaactgtatttgatagtgcgatgcaattacgcgattgttatgtactaaagagagatgatgatacggatctttacatagatttcatgaacttaaaacaatggtgtcagaataaattccaagtaaccaatcaaatcagtgtaaaagataagtacaaaagccgttatgatgtgacaattcccggtaaaaaattatatacttcaataaaatgaaatttgtaaataaaaaaataagagatagaaccacaatttcttgttctacctctttaagtgataaagtgttatttttcttttacaagttttttaacttcttctaattctttttcaacatctctattcggttttttagtcataagacttacgatataagtcacaatcaaacttgttaaaaatccaggaataatttcatataaattaaagaagtcattatattctcccaatggtttcacaaaaacaatccaaataatgacgacaactgatcctgatatcataccagaaatagctcctgtacgacttaatcccttccaatagagagatagtaataccagtggaccaaatgcagcaccaaatccagcccatgcattaccaacaagattcagtatagtatcattcggagtccatgcgattataatagatataattgctataataagaacagataatcgacctactaataaaaactcttttttatgtttttttgcagcttcttcgcctctaattaatttatagaaatcctcagtaagtgaactagaagtaacaagtagttgtgaggagattgtgctcataatagctgctaaaattgctgcaagaaggaaaccaccaaccaatggatggaataaaatttgacccattaaaataaaaagcgtttctggatcatttaatttaactcctctatcttgaacaaaagcaatacctatcaatcctacacatacagcaccaattaaactaatagccatccaactaataccaaatcttctggctgtttttaatttactaacggatttgattgacatgaatcgtactataatatgcggttgaccaaagtaacctaatccccaagcaaagaaagaaataattcccacaatagtggtacctttaaataaatctaaattagtcggttttaaatctgctgcttgagaaaaagcatcaatacctccgagctgcatcatggctacaataggtaccataaccatcgcaattaacataactacaccttgaaagaagtcagttaatgatacagctaaatatcccccaaagaatgtataagcaataacaatcaccgaaactagaataagaccagcatgataatctagaccaaacgcactattaaacaatttaccacctgaaaccatacccgagtgagtatatagtgtaaagaatacaacaataataccaccagagataattttaataatattagaatgatcattaaggcgatgtgtaaagtagttaggtaatgtgattgagtcattcgctttttcagtgtacacacgaagtcttggtgctacaagtatgtagttaacataagctccaatagttaacccaatagctaaccatgctgctgataaacctgtagtataaacttctccaggtaatcccataatcatccaaccactcatatcagaagcgccggctgataatgctgtgacgtagggccctatatttctccctccaagcatatattcactcaaatccccagttgcttgtttataaccatagtacccaataataagtaaaataaagaaataaactgcaagcataacataagttcgccaatcaggatttacttgacttgacaatgatgtagcaagaataaacataattaataactcctttattatatatttattttagttacatacaataattatacaaaaaataagatttatttaaagggtaaatttaaatttttggcgtttaatgaatcttattaattgtaaatactatatttatgtagcaatgaatatatttttaatattaatttttagtatataatattcattaattttgtatataacgataataaaaataaatatactatatttgagtaacatataaatcgatatatttgatttgtcatttattacgaatcccgttgacaatatgagaaaattccatataaaaacctgtgataaacgttggtgtaacaaggaaatcccgaaataccgtgtattttgatgaacaatcagctcattatttatgagtattgacgaggagtgtatctctctgattccctatatatattattcatttataaaaaataacgagattttgggattgtgcttgtacttgtacaatccttctgtttcttcgaatctacaaatcccattccttttccggtaaaaaattattgtgggctgttctttagcaatttcaatataagcattgtatagttatgaaaataattacgacaatgactgtttcattagataagtgttattgaaattgataaagagaattctaaaattggttagataaaataaatgaaagaataacagaatagtcattgtttattcaatagttatatatatagtttgcgacaaaaataaagacgaagtgctgaggagcacttcgtcgagtggatggttattaaatagttgtttattaaaagcgttattcaattttagaataatgtaaaattactttttatgatatttatctatctttatatcaatacgattgataaccgttagatacagtgatgtcacttgttatttctctaattcttcaatatctttgaacattgtctgtaacacattagcagtcatatcagtattataatgtggagactcagcttgtttatcttgttctagttgctagtactaattatattagtatttaaaatttaaatattttgattatataaaaaacgttgatacaattcacataatagtaagtctatattttttattttggaggaacatatttggggaccctatttagtctgattacttttatattattattagtcctaacggcatttttcgtagcgacagagtttgctatcgtgaaagtcagagaaacaagaattgcacaattgtctaatgcaggagagaagaaagcaatcgctgctaaaaaagttgtcgatcatcttgatgaatatttagctgtctgtcaattaggtattaccattaccgcactaggtattggtatggtcggggagtccacatttgaatttattctacacccactattcagtagtataggtattcctgaagcatggatacatccatttactattggtggtgcgtttgttatcgcgacatttttacatgtagttgtaggtgaaatggcgcctaagaccattgcgattcaaaaagctgagtatattacattactctttgcaaagccgatcatctttttctataaaataatgtatccatttatttggctattaaatggtgcagcacgattaatcttgaaaatgttcaacatgaaaccagctaaagagagtgaggtattccactctgaagaagaattgaaacaattaattcaagatagccatgaaggtggcgaaattaatgacagtgagttacaccatattaatcaagcatttaaattcgataatttagtcgcaaaagatattatgatagaccaagaatatgtcaaaacactcaatttaaatacgcgttttgatgatgcgattcaacaaattaaagaagatgcatttacaagatatccagccattaatgatgatcaaattgttggttttatccattccaaatcattatttaatgtggatcagccatctaagttagcgacatttgttaatccaattatcaacgttaaactgaatacgccattgaagcacattttggaaatgatgaaaaagaaaaaagttcatattgctgcagtttatgatgatgctgatttcaaaggtatcattactttagaaaatattcttgaagaaatcgttggcgatattgaagatgaatataattaatacaactgtttatattgaccctatcattgagatttgaaagtctgaatgataggggattttttatttatcgactttaaacattgacatctgactcaacttgtaactataacgattacatgcgatgagaagagtgaaaattagtagttgttttactgtagttggcgaacaagtattattgattaaacgagtcatttaagactagatgatttattgttatggacatattcatgatgctattgaagcagtagataaagatggcgtggacttaataggttatacaccttggggtattattgatatcgtatcatttacaaccggcgaaatgagattaattcatgtagatcgtgataacgagagaaatggctcattagaacgtacaaaaaaagcttcatttgattggtatcgtaaagttattgcatcaaatggtgaagaattataattgtgttacatcaataactaaatagaaaagacatcttgttatagctttaataatgatagagatggcgtaatagaaacattgaatacattacttataaatgacgataattcataatgaatgaaagaatatgtaatctacctttatacgattaaccgcattattaactgatacgtagaagcatactacaaataaaattaaaaaacagatggtagaatatgttagcatttaatatataaattagtttttaaattacataaaaactaatttaacaaagaatttaaaatgggagttttctatgaatatctatcaaacctatgcatgcttagtcataggaataatcgttttgggaatagttgttaatactattactactatagtaaaaagaaaaaaattaatttcaaatattaaacaactttggaaaagtaaaaaaactttagaagaatttatacgtccaaattcgagatttgattatcagtttaatcttcgacgtaagaattattctgatacattaatagatgataaaacatggacagacttagatatggatactttatttcataaaagtaattttaactttacagctattggagaaatgaaatggtatgctactttgagaaagatgtttactatcaataataaaaagttagtgaatcaatttaaagatgaacaatttagagtaaatgtatcttatcatcttgctttgataggaaaagttgtttatccactttttcctgatcaaattaaaccagtaaaacgaaataatttatttatgctatgtccatttttgccacttctaggtgcaattataatatttattaatatatcattaggaattttagtcattcttttttctattttacttaatattggtttatcagcctatctcaaaaaaagttatagtcaagatttaaaatccatcttctatacttctaaagtaatcaagcatagttattctttaagtaaaataaaaggcacaccaagtataaatattgattttcaacaatttaaactcgcacgttcattaagcggttttattggaaaagcagatgatcaagatattggtggtacatttatcatgctctttaaaatgagttttatgttggattacttcttttttcatattattcaatttacttacattaaacatcaagaagaattgcttcaatgttatgattacataagcacgttagataatcattattcattagtgatgtatcgtcgaacattacatacatattgcgaaccatctattattaaagataaacaacaaataacatttagtaatttattgcacccattacttacagaagcggtaccaaatagtttaaatataaagcataatattttattaaccggctcaaatgcctcaggaaaatcaacatttatgaaagctgttgcaactaatctcattcttgcacaaacattaaatactgctacagcaaaagcgttttcatacaagcctggattagtttatacatcaatggctaatacagatgatattttatcaggagatagttattttatgacggaattaaaatctattcggcgattatttaatattaaaaataatcaattggtatattgttttattgatgaaatttttaaaggaacgaatacgacagaacggattgctgcttcagagtcggtgcttaattatttagatactgagaaacattataaagttatagcggctacacatgatatcgaactttctgaatatctaaaagctaactatgaaaattatcattttaatgaatcgatagaaaataatcagatttattttgattataaaataaaaaaaggtaaagcaaatacgcgaaacgcaattgaattattacgtattactcaatttcctgaaaaagtatatacaagagcaaaacaaacaattaaataaaacctaaaccatatatatgactgtatggacatttaatagtatatgagcttctgctatattccatatactttggaatataaacggtttattaaataaaggagaaatgggtaatgacgatgtttcgtgaagcactgatatggatagtgcttctcttattcaacttaataaacacatttttagtacttgtgggaaaaacatcattgttcaaggttccactttggagcacatggttagtttggggaatagttactataattatagtaggcgttttgctttttagaaaacatttacaaaaaaagcagccactcattaataaaagtctcaataataaagattttaaagcggaagaattctttgtacaaatgcctttatatatcattgagaatcaaagcaatgtgatatacggtaacgaaacaataacgtataaacccgtttttgttaatagatttcataaattattgagtctctttggtattcaaacaaaatatagtctatatatgacttctagtgagaacgatgtaaaaataattcgtaaacatgtgttagcgaataaacatcaatatacaatgtatttgaataatgaagaaataggtacacttgagatgaaacagttcttcaaaagtggaggaaagcaacaacttccttatacgtttaattacaaatctgaagtgtttgatgtaagcaatccgttttttagtaatgaaactaaaattacagttgagaatgacgtattattaaccgcaaagcgtagttttttagatatttcaaaaagtaaacgaactaaaaaacgaggcgaaaaacacactatacacattcacagtactagagtagagaaagaaatattaatagccatttacttacaatgcatgatcaataagcaaacacaataaatgaagtatcgctatagtataagttgacccgtatattagcgaataaagattttagtacaaatatatcctattatcataacggctaaaaaagatagtgaaggtaataaaacaaaccatattgacataactatctctccttactcatcatattttgtattgaaactctaaacttataagtaaaagtgatcgatgattttaaatatagtttaacaaaaatagtttaaaatgaaataacttacaattaatatattaaaatgtatataaaagttttaaaaataaaataagttatatatcactcacttggaaatgaatgaactaagaatgttacaatgcaaatgagtagaggagagtgtttatgaaaaagataatagtattagctagtctattaggtttgtcttttatcttagcagcttgtggaacatcgggagaacagaaagagccttctaaagagagtcaaaagtctgagaaatatacatatgagtattatgaagtgctaaataatggttcagaagatacacccaatgtggaaataaaatataaagataaaaatggtaaatcacatttacaaaaaacggatttagaacacgtttatgaacatattttaaatgatggaaataaaaaaccttatatcattaaagatggcaaaaagattcatgtctatcgtccaccatatatgatttatggcgatgatgatattgaaggacaagttaccgctaaagatgaagtgtctaaagagtaagaggtgagttggtgaagcataaagtattaaaaatgataagtataatgataatctttaatgtgacttcgctttgtatattgtctacaaatttagaagcggtaacctcaagcacgagtagctcaagttcgagtagtagttcgtcatcttctgcggttagaagttcaacgtcttcaagttcatcaatgagtcgttcaagtacaatgaatgcttcacgagttgcaaaacaatcaagtcagcatgcagcgcaacaagctagtcgaacaaatagtattacatataataacaaggcatcaaaattcaaacaagacactggtaaacttcagtctcaacaagcacgatcaatggtgtctacaagacatcgatatagaccaggagcctcatatacgtcacaatttatggctacttcatattataataattggttatatttttattttattacatccggtatgtataaaaataaaaccaatcatgtcgaataccaaaaaaacatgttgaaacaacaaatgaaagcgcatgagaaattatataccattaccgttcaaactaataaaggcaaacgtttagttgttgtcccgaaaaagcaatacgataaaattaaaaccggtgagaaagtgaaaattaaaaatagtgtattgcaataactcacattgagtaatccaatgttcttaatagaagggaattttaataaagttaaagtgtgttcatcattttaaaactctgtaatcgtctaaaatggcatattaaaaaaagcgtctcaatgatattgagacgcttaaaatttatctagccttaaatgattcaatagcggttttgatttcatctctaacacgttggaattctgaccaaggtttgccagcaggatcatcaaatccccaatgttctttctttacattaggcggcaatacaggacagttttgatcagcatcactacatagagttactactaaatcggattggtttagtatagtgttgtcaattaaattagaagtatggtttgagatatcaattccaacttctttcatcgcttcgattgcctttggattgacaccgtgtgcctcaataccgccagaatatacttgccattcatcacctaagatttttttgccccagccttcagccatttggctacggcatgaattacctgtacatataaagtaaattgtttttttatccataaatagtctcctctttttttagaaaataataagtgttagatataaccctaacagtgtgataaacagaacaggaatcgtaataacaatacctgttttaaaatatgtgccccatgaaatttttactcctttttgtgttaaaacgtgcaaccatagtagggttgctaaggagccaataggtgtgattttaggtcctaaatctgcgccaatgatattggcataaatcatgccgtctttgattaaaccggtagttgcagattgtccaatagcaattgcatcaattaatacggtaggcatattattcataatggctgaaaggaatgcggatataaagcccatacctataacactactaaacaatccatagtttgatatgcttgatagcatattagctaataatgcagtaatacccacatttttcaggccaaatacaactaaatacattcctatagaaaagagcacaatattccaaggtgcgcctttgatcacttgtttcgtgttcacaacgcttgattgataggccaatacagtaaatataaacgcaattgaacaggcgattatcgatactggaatttgaataaattcactaactatataaccaataagtaagattgataaaacaatccatgaaaacttgaataattttgggtctttaatggcttgattaggtgttttaagatttttaatttcaaaatggttaggaataacttttctgaaatatagccataatacaacaatacttgcaagtaaagagaatagattcggaatcatcatgcgacttacatattcaataaatccaatatggaagtagtcagcagaaacgatattaaccaaattacttacaattaatggaagagacgtagtatctgcaatgaatccacttgcaatgataaaaggaaaaatgactttttgattaaatcctaaatttcttaccatagctagcacgattggagtgagaattaatgcagctccatcgttcgcaaagaaggctgctacaatagcgcctaacaacataatgtagacaaacattttaaacccatgaccatttgaggctctgaccatatgtatagctgcccattcgaaaaatccaatttcatctaaaattaatgaaatgagtataacagcgacaaaggttaacgtcgcattccaaacaatccctgtaacttctagtacgtctgaaaagctaacaacacctgtaatgatagcaataacagcaccgattaaagctgtaactccaatatccaaacctttaggttgccatatgataaaaattaacgttaatataaaaatagtgattgctaatatcgtcattgttaacactcacctttctctactgtttcacatatacatgggacagtacaggaactcaatagagtgagtcgtgatgtaacgttatccaatacgtcatgattcaatttgtataaatttttattaccatcctttctagatgtaattaaattattgtcttttaatactttcatatgatgacttaatgtgggttgagaaaaagaaaaatgctctaataaatcacaagcgcataattcaccacaagataacaaatctaatatttcaagacgactactatcagccatcacttttaagtattgtgaaatttctttataattcaatttttcttcttcctttctactaggaaccttttataacgttgataatttttattgtcatttgataaattatatacttgcttaactcctaaattattaactggtttaaagtagactctaggtctcattataatcaataacattaatattctgatattcgataaggtatgacaaagtaattatcaaaactttcatttttaattttatttatccaaaatgattcatcttcttttttgttactaaaaaggtcatcacgttgatttagcgtaactaacgattgattaaccacccaccaattatggcctatattagctctgtttaaatcttctactaaacgtttagattctaaataaggtgttttttctgctagtgttacgattatcatctgtgttaaatttttattttgaattttaggtaataatgtttcaacattattggtagtttgagttgattttttctttaattctctatgatgattttcactagaatcaagtaacagcaaggtatggcctgtaggagctgtatctacaatgacgtaatccatgtcgtcttgattctccataatgtcactaaaggctttgaaaaatgctatttcttctgtacaaggtgattttaaatcttccataatataatcgatatcgtcttgtggtgtatcatcattcactgtggctagtacttcttttttatacttttctaatgcttgttcttcatcaatataagcagtatttaaattacttgtagtttcaacattaatttctttagtagggtcagtagttgctaaaagaacactatatcctttattagataatgttgtagctaattgcgttgctactgtcgttttaccaacgccaccttttcccattgtaaataaatattgaactttactattttcaatttcatcgattaatttattgaattgcggatgatcttcaacaataaagtcatcattttcaattaagttatcatcatttaatagattagttaaactttctataccttcttctttctgctttttatatggaacgtaataagcatgattgttatttaaccattcagtaaaatgattaatgtttttatcttgttctgatttcatctgactcgaaattaaaccgtgactttcttctatatagttgttaatgattactttgaatttagaaattgatagttgttgtaattcttgttgcgctctttgaatttcatatatagaagagtgagtaggtcttgcaactaacatcatggtcgtatcatcttggttacgtagtttttcaagtgctgaattatatttaactctattttcatttaaacctgataattgacctaagcaagaagcgtcattactcgttgtatttaaataatctgtccatgcagaaggtaattcaagcattctcaaggtgtgacctgtaggagctgtatcaaatataatgaaatcaaattcttgttctaaagttttatcggataaaaaatttgtaaattcattaaatgctgctacttcaactgtacatgaaccacttaactgttctttcatttcagaaagcacatcttctggtagaataccttcataaggttctatagattgtgctttataatcgtctgcagcagcaatcgggtcaaaattggctatagagagattaggtataggttgatatttagttaatttattagataattccatttgaaatacatcttgtaaattactagctggatcagtacttactaaagctactttctttccattctctgctaagtttaaagcaataaaacttgatatcgtcgttttgcctacgccacctttaccagtaaaaaacaaatattttgttaactcaatgttatctagattcaatttatttaaatatttaacagcatccatctccatcacagcatcctccatttctcatttgattaactgtaatgatttcatcggcttcttcttgggtaatataagcgcccgttttagctataccgccttctataaaagtgattggtaaaacttcatcacctttttcttgaattaaacgaataacttcttgatttttaatgaattcattcggattattattcatattataacgttgaacttctatttgattttgttttaaatattcattgatttggttcgcttttattagtgtttcatccggttctggaccacatacgccagtagaacagcacatagcttcttcgtatatttcaatatttaacattatactcacctcattaattaatttacgattatagattaacatctatatagattaatgtctatgttcttatttgagctttaaaaacttcattaaatttaattcttaataatataatttataaaaaaattattttaatatttttgtgagcaatacctaagtttatgtaaaaattatagtttttttcttgcgataatatggatattgatttacatttaatacatcaaaaaaaattgatgtattaaatgatataaaactacgttgacaataaggaggcgtgcttgattgcgagtaaaccatgcaagtactttaactgttggttattttgtaagttatttaaatcttgttatgctatcaagagaaatcaatttaaaagaagctacaatatatatggaaaaggagttctttaaagggaacattaatcagtatggcgaatcaacaaaaaataactataaacaagcaattcaagaattgaaataaagataatataaactcaatgaaatattataaaaaggatgatcttttatggaagttattaaagcaaagactgatatgagtgaagatcaacaatttgacttttatgaaaatatgtttaatgcacttgccgataaaatcagattaaaaatactaaatcaaattagccaaagcttcaataaatcattatgtgtatgtgatttagaagagttattagatataaaacaatctaaactttcttatcatttaaaaaaattagtagatgcaaatgttcttattgctgaaaagcatggcacatggaattattataaaattaatgagcagcaaatacaggttattttaaatgaagatacttgttgtaagatactttaagtatcttttttaatgatgtattaatcaattttttttgattaatacatcaagaaatattgattaattaaatttggaggcgttatactcatgttagattcaattatggaatttataaaaacatttgtgatgttgttttttgaactattcatactatttatcatcgtgagctttatcgtaagtatcatccaacagatagtttcagaagaaaaaataaaatactttttaagtaaacctaatcaagctattaattatattttgggaatggcttttggtgcgatgacaccattttgttcttgttcaactattccaatacttgcaggtctattaaattctaaagtaccttttggtccagcaatgagttttttaattgcgtcacctttaatgaatccattaatgatatttatgttatgggccttattaggttggaaagttgctgttgtttattttattgtactagcaatctttagtgtcttaacgggtctagtattttcaaaaatgaatttatctaaaagttataaaggtgtaaatgttaaaggcgatgggtttttcgctaataaaaatggatctcgttttaaacaagcattaaatgatgcttgggcattcttatatccaatgattccttacttatttatcggtgtatttattggtgcttttatatatggctttgtacccgaaacatttattactaaatatgcgagtggaggtggcattatatccgtatttattgcttctattataggtattcctatgtatattagacctgaaacaatgttacctatagctgaagcattagcttcaaaaggaatgtcgcttgggacagttgttgctttgatcattggtggtgctggtgcaagtattccagaagttgtattattatcgaaactattcaagaaaaaatttgtaatctcattcgttatcgccattttagttgtagctatttctacaggtttgatggtgaacatcgttatttaaaggaggtgagataatgggagtcaaagacgtattaaaaaaattaaaacctcaggatcaatcatgttgttctgtagaaattgaagaaaaaacagagaagaatgaaaaagaacagcaggataataataattgttgtaacaattaatttagaagtctgtaaaatatatgcttctaataaatgaacgacaaattccaatgtaatagtatggaatttgtcgttctttcgtttcagttaaggaaaatgttgttgtttatttaatattctttaagacttataacaaaaagacgttaattaaaaaccgcatcattaaccgatacgcagaatcatattataaataaaactaaaaatgaggttgtatataactcactctgaaattgtttgaatatatagtatctttagtaaaatgcagctattgtggcgtaaaatttgagaatcaaaaaatgattaatatagtttgaaaagactgaatataaatactagaaaaatagccagtaaatgagtttattatgaattcatttactggcttctttaaataatgatctagacaatttgcttttctagacctactttgaaatgcgttattttctttaagaatagtaatatatgatttgtgttgataatgctaaccttggtcagagtgtattgtcatgcgatagttcagatgagattttttaattaaaaccttgttttaaacatcgatgacaaggtctaatgtaggacgtgtagacatcattttcagaatgatataaataaatccataaatggagataaattgaaactatttataccctatgggggtatgtgttatagtataagtagctttactataacattttcattgggaggggttaatttgaagaataatggtgaagcgcataatcatcaaaatcacatgaaacattccaatcaaatgcatcatgataaccatgcctcacatcatcatagtggccatgcacatcatcatggaaattttaaagttaagttttttgtttcattaatttttgcaatacctatcattcttttatcgccaatgatgggtgttaacttaccttttcaattcacatttccaggttctgaatgggtagtgttaatattaagtacaattttattcttttatggtggtaaaccgttcttgtctggtggtaaagatgaaattgctgcaaaaaaaccaggcatgatgaccttagttgccctaggtatttcagtagcttatatttatagcttgtatgctttttatatgaataacttcagtagtgcaactggtcatacaatggactttttttgggaattagcaaccttaattttaattatgctattaggacattggatagaaatgaatgctgtcggaaatgctggagatgctttaaagaaaatggcagaactgttacctaatagtgctattaaagttatggataatggccaacgcgaagaagttaaaatatcagacatcatgactgatgatatcgtcgaagtaaaagccggagaaagcattccaacagatggtattatcgttcaaggacaaacatctatagatgaatccctagtcactggagaatctaaaaaagtacaaaaaaatcaaaatgacaacgtcatcgggggttctattaatgggtctggaacaatacaagtcaaggttacagctgtgggagaagatggatatctttctcaagttatgggacttgttaatcaagcacaaaatgataaatctagtgctgaattgttatctgataaagtagcgggttatttattctactttgctgtaagtgttggcgtgatttcttttattgtttggatgctcattcaaaatgatgttgattttgcattagaacgtcttgtaactgtgttagtcattgcttgtccacatgctttaggcttggcaatacctttagtcactgcacgttctacttcaattggtgcacataatggtttaattattaaaaatagagagtctgtagaaatagctcaacatatcgattatgtaatgatggataaaactggtactttaactgagggtaacttttctgtgaatcattatgagagctttaaaaatgatttgagtaatgatacaatattaagccttttcgcctcattagaaagtcaatctaatcactcattagctataagtattgttgattttgcgaaaagtaaaaatgtttcatttactaactcacaagacgttaataatattccaggtgtcggattagaaggtctaattgataataaaacatataaaataacaaatgtctcttatcttgataaacataaacttaattatgacaatgacttgtttactaaattagctcaacaaggtaattcaatcagctatttaattgaggatcaacaagtcattggcatgattgctcaaggagatcaaattaaagaaagctcaaaacaaatggtagctgatttactatcaagacatattacaccagtcatgcttacaggtgacaataatgaagtggcacacgctgtcgcaaaagaattaggtattagtgatgtccacgcacaactcatgccagaagataaggaaagcattataaaagattatcaaagtgacggtaataaagtcatgatggtcggagacggtatcaacgatgcgccgagtcttataagagccgatattggtatagcaattggtgcaggcacagatgttgcagtggattcaggtgatatcatacttgttaaaagtaatccatcagatatcattcatttcttgaccctttcaaataatactatgagaaaaatggtgcaaaacttatggtggggtgcaggttataatattgttgctgtacctttagcagctggtattttagcatttatcggcttgattttatcacctgcaataggtgctattttaatgtcactaagtacggttattgttgcaattaatgcctttacattaaaattaaaataaaagataggagttttattatgattaaaaaattattttttatgatattaggatcattactaatattatcagcttgctccaataatgatgaaaaagataaagacactaatgaccaaaaaagtgagagccatatgaagcataatgatgaaagtaaagttccagaagatatgaaatcgactaatgagggtgaatttaaagtgggagataaagtaacgattacagcagggcatatgtcagggatgaaaggcgcagaagctactgtaaaaggtgcgtataaaacatatgcctatgttgtaagttataaacccacaaatggaaatgaaaaagtaaacaatcataaatgggtcgtaaacgaagagattaaagatgcacctaaagatggatttagtaagggcgatactgttaaattagaagcaaatcatatgtctggcatgaaaggtgctacagccaatatagataacgtgaaaaagactactgtttacgtggttgattacaaatccaaagataatggtaaaatcattaaaaatcataaatggatgacaggaaatgaactgaaagcacgctaaaaatctagttctaaattgagaaataaatagatataaaaattaaaaagaagtcttagaagaataacatttatcaaaaaacgcttaatagacgtgaagaatatcgtctattaagcgttttatattaatattttatcagtacattgcatttttctacgccaaacaaagtagttaaatgatactagtcttaatttttcacaacatactattcgcaatcataatacgcaaatatcttctcgtaaactataaatgatgacctttaaattattcgtcgtgtttaagcacgcgagtcatttcttcaattttgccggcatgtaatggaacatggaaggcatttagtactaataattcattgagtgtttggcaaccagcaacgggttcgttaagttcttgtgataattgttcatccgttagtttgcgcgcacgttcaggaagtgtttttaagttttctttaatcgtttcgattgatggaacatcttgtccttcccagttagcagggctagatccgtaaccaaatagtttagtatatttagcgatatctacggtattttgactacctattgataaagcagaatcgaaaatcgttaaaacatgtccaaattgccaatgtaacgtatttggaaaaacatcattttctttatctaatacgcgttcaacattccaattatcatacacagatagtaaatgatttacacctatatcaattacatcataaactgttttatcattcatttacgtttcctcctatatttaaaaagtgtagtactaaaaatctacccgttaaaaattactcacaaacactatgattagaagtaccagttttatttactgtatagcatgaatggatgtaaagaagatgaagactagacaagtaatgtattttgaaatcatcatctcatttcaccaagtttatcaagaagaattaggattgaaataagcttagcataagcgtattttcaactcagtcatcgactgctaacatattaaaaatgcccaagacatttaatgatgtctcaggcttttttatctatttgttcaataagttacgtatatattttttatttatatagtcattattgtggttttaaaataactttaatattgttatcttttttctgatcgaaaatattgtacgcttgttttgcttcttctaaaggcatggtatgcgttatgatttctgttggatcaaacacttcatttttaatcatttcatataattttggcatttgatgaataactggtgcttgaccactttttacttgaacatctctattaaaaattaaatctactggaaaattatctgcaggtgtagcataaataccagttaattgaatggtaccaaattttcttactgattctgctgctgtaataattggactaatattaccacgttgcgctgagtttgaactcatctctaaatcatcttgagcaacttgtccatccattcccacacaatctatcacaacatctgcaccgccacgtgtattttcacgaagtaattttccaatattatcttctttagaaaaattatacacttcagcaccattgaattttttcgcatggtttaatctatgttccacattatcaatggcaatcacacgttcagcaccttttaatttagcaaatttttgtgccattaaaccgattggaccacaacctagaacaataacagtatcaccagattttacgcccgcatgttctacactccaataagctgttgggacaacatcagataaaaataatacttgttcgtctttcaaatcactatctggaactttgaaagaagagaagtcagcaaatggaactcttaaatactctgcttgtcctccccaatggttcccgtgcatggcaccaaaaccgaaaagtccaccattgtccattttccaatttgcaggggatggattagagttgtcgcattgagattccatatggttattacaatagaagcagtcaccacaaccgatgttaaaaggtataaccactctatcacctttttttaaagtcttaacgtcttttcctacttcttctacaattcccattggctcatgtccaataacaaaaccaggatccataaataaatcgccttgatgataaagatgtaaatcagaaccacatatacctgaagcggttattttaataattgcatctgtggattcttctatcgttggatcgttcacttcacgaacttccatatttttatgaccttgataagtaactgctttcattaatatcgccctcctcctgtcaatctaccccttgtaacacattataaacgctgaagagtcatatattatgtttagatgatacggatatgtccgaattagaagctactttagtagaaaggatatagacgcatcgaagctgcattcatttatggaaatgaagaaaaagtagaggaaggtcttgtaacaataagacttaaacgtgaagacgtatttatcacaactagacgatgttagacgagacaatgtggaaaaaatattattaaacattagacaatcttgatttagattatttggagttatattgagtacaccaaccaagtacaaatgaggtggtaatgattgatacatgaaaagggaggaaagattgatatcaatcagacaaagttaaagtatcggagtaagtcactttaatagagaggttttgctttagaaatttacatgatgatgagcaatactattgaagaagataaaaaaagagattataccatcgtataatccccgtagatacataatatataattgaactcccaactaatacatagtctttcccctaaggccattatgcgactatgccttgtatttgtctatgttcaaatatgttaataataaaaaaatgagtataacgtttatataaacgtgtacatggtttttacacgatctgcctagttaggtcataagaaatgaactatctattcaaggccatacgcaaatttgattttatatagttcatggtcacttaaatgaaattcattagtatggaatacatatttaccaaatatatttttagcttctttaggtgagataatatattcattttttaatttttctaactcttgagctacacttgttgcaaaattatattgatcatcacgtgtgtgataatcattaaaaccattttctgattgttttattaagttttctatttgagttgaatccttattatttcttgataatctagattttctaagtctttctaacgttttcatcgctttagcgtatttatcttcgattgcttttactctatttaatgtttttaatgaggctctatttggtataacgtgacgtgatgaatcataagcatatttatcttcaattgcttttaaagtgtcattaaatttatctgtagcttgattttcattgttttgacttgctctatttaattcactatatgcattttgtatctctaattgcttggcgacttcttttaaatattgtgttaattcattcatctagacaaactcctttatttatttagttttctttattgaacattttcttcatttgtatatatatatcacttaatacatataataaaacattatgatttaattataaattatttaacaagatataattatttagtattaagactattatatatattaaatgtaaaaaaacgataacaatcaatattaaatattgtaaaaagtatagttggaatctataaccgatgaactgtttatcttaaatagtgagagaaagactaacagaaacttaatataatagttaagtaataaaaaatgcccacatctcatgggcatttttatgattacattgtactgatatcaataacaaaacgatatttaactttagatgccaacactctttcgtaagcatcatcaatatcatctgctgtaattaattcaatttgtggggcgatatgatgttcagaacagaaatctaacatgtcttgagtttctttaataccaccgatagcagatccagcaaatgaacgacgatgaccaattaaattaaatacttgtaaggatacaggctcagctggggcaccaacattaacgagtgtaccatctaaggctaataatttaagatagtcatctatgtctaattttgcacttacagtattaataattaagtcaaatgaaccagcaagttctttaaatgttgattcgtcacttgttgcataataagctgaagcaccaaattttaaaccatcttcttttttatttaacgtacgtgataatacagtcacgttagcgcccattgcatgtgcaatttgaactgccatatgtccaagaccacccataccaatgattgctacattctttttaccttcataggctttccaatgatttaaaggtgagtaagttgtaatccccgcacacagtaaaggagcagcaacctctaaactgatattgtcaggaatacgtaatacgaaatcttcttggacaacaatatgtgttgagtaaccgccttgtgttttctcaccatatttgtcagtacttgcataagtacctacacttccatttaagcagtattgttcttcgttatttttgcagttttcacattcaccacaagaatccaccatacatccaacacctacacggtcgccaactttatatttagtgacgttaggaccgacttctttaacaatacctgcaatttcatgacctggtacgagcggataatcgacagggccccattcttctcgagcagtatggatatcagagtgacaaatacccgcatatttaatttctattaatacatcatgtttatctaaatcacgacgttgaatttcagtagcgaaaaattcagagtccgggccatttacagctcttgcttttacattcatcatagtcatttcccctaatatatataagatagaatatacgcgtttgtatgattcttcatattgacaatagagacttagattaattaagtcaacacattgaactcaatatgtatagtacaaggtgattttaaactaatcgttgtgaggcatgtttcaatgacttcatattagaaaggaaaataaaaacagataaatagacttttaatacaaatgtaattatattggtaacatgttgagggacatccaagagatatttctgataaatatagaagtggaggaacaaacgatgaacattggtattattggagcaacaggtaaattaggaactaaagtattagatgaagcacaacaacggtaactgcgattgtaagaaatgctgctaaattagatgatgataaagatgttaaagtgattgaaaaagatgtatttgatttaacttcagacgatattaaagatttagacgtggtagtcaatgcatttggcgcgccattaggtgaagaagaagtgcacgttgaagtgggacgcgtatggattaacatattaaaagatgtagatacaagagccattattgtcggtggtgctggtagtctatttgcagatgatgcacatactatacatgttatggatacaccagatttcccagaaatagtgaaaccaacagctaaaggatcaagtcgtaacttacaagacttacaacatgctgaaggaataacttggacttttattagcccgtcagcggaatttgactttgaaggtaaacgtacaggcacctatacgttaggaaaagatcaattattatttaatagtaaaggtaatagttatatcagttatgcagattttgctattgctatagtagatgaagctgaaaataaagcgcatattaatgaacgtttcacagttgttggtgaagaagaataatagtgactctagatgccctttaggagaaataattaaaaaggccaatctaaattaaaagtaattagccaaaatataatggtagccataaaaacattaaatgaactgtttaaagaatgtcctcctatgtatctacatgatggtatttaggaggatattttagtgtgagactacattattttgttttttaataatagattcataactcattaattatataaaagtagggtattaaatataggaagactttaaaggagagaattatgattaatattaaaaaagttacaagaattgtattacctttagcaggtggaatggttattgggagattaacagctaaagctcaaaatgattataaacattatgaaaaaccacctttttcacctccagctaaagtatttccaattgtatggccactactttatacctcaatgggagtagcttatcaattatcatatgcgcatgcagctcataaaagagagaaacagtctataacacgtgctcattatgcacaattaggattgaattatgcgtggacgatactttatttcaatttaaaactgagaaagacatctttaattgaaagttatgtattacttgcagctggaaatattactgcacatcgtttttatgcatctaataagtatgctggtttattaatgttaccttatgtcatttggttaagttacgcaagttatttaaatggaggtaatttaatcttaaatgaagataaaccaggttatactagggattaacactgagtgatatgtatgacagaatatatagtaggatatattaagtgacagtaggagattaattttaagtattattcttttataaattatgtaaaaaaagcacaagcacgtatacatacatgcttgtgctaaaatttatgtttaaacagggacaacatttgttgcttgttcgccacgttgaccttcagtgatgtcaaactctactttttgaccttcttctaaagttttatatccatcagtagcgatacctgagaagtgaacaaacacatcgtcaccgtcttctctttcgataaatccaaaccctttttctgcgttaaaccatttaactgtaccgttattcatatagaatacctccaagtgcttttgcacatcatatttgtaacaaattcataaattaaaagagaatattctataaaaatatactacaatccaaaatacgagcttttattacgtgaaaccaactatacaccttttgaatgaataagtacagcattattttgaaatttagcataatttcttttggaattataaaaatacatagataacaagactaagatttataatttattaagatcgttatttgacatatatcgaaataaatatatgtaaaatgaatgctacggtggcgaaacatctaagattttaattactttttaatatatcctaaattgccaccaacagtttcataaaaatcaaaacgcatgcctgatttgataactgagccatttaaatctttatctaaaactgtaagagctaattttccatcaggtaaattctttgttgtaaattgaacagtatattctccagatttaaaacgatgtttcttaatatctaatacgatgaattgagttggatcttttcgatgttttacttctagatactttaactcagagtttttagaaagtatttttaagaacaccttatcattctcttgagagatttttagtaatgtaggatgcattctttttttgtaatgtgttcctttaaacgaatagtaatatatatcgtttttctcatgaagcggcttatcatcttttttaagatagaatttaacaaaactgataatgtcttctttattcccctcacgtattagtttgatggcttgtcggtttaaatcatcatctgcatagtctaaagcatcgaaatgttcatctaccatatgaatgatattttgaaaaataggaagtaactcatttatgtttttaataaagccttttttatagaatttagcttctaaaacatctttattaataatacgatatagtaaattaggcattaatttattatttttatacttactcattaagtgacgataggcttcaccttgccatttcatacgattaatatgtgttgatttttctgattttactaaagaaatattatcgtcgtaacggttagcacaataaaccacatcttgtgttgtactaatacgtttagtattgaaaaagacttctgcgaaaaattgtaaatcttctccaaaaatcatttctggaaattgaatatgattctttttaatgacgctagctttaatcatacgaccagcaggtgctaaatgataaaatgattttctaaagtgttttaaatctactttattatatgcaattttagatagagcaacgccacttctagctatgcgatcactatgcacatattttgttaagcctgtagcatagtctgtcttgtttgtttttaaaagtgtatataacttttctagagcatcttcaggtaaccaatcatcaccgtctataaacatgatgtactttcccttacttaaatcaatagataaatttcgtggtttcgcaggtgtacccgaattttgatctaattgaataaatttgtaattagaaaaactgtctatttttttagaaacaatatcaacggtttggtcagtagaacagtcatccaccacgattaattcaaaatctctcatatccatcgattgttttaagacactatctaatgttttattaataaatttttctttgttatacgtactaattaatacacttactttaggcctatgattgatttctttactctttataaccttcatttttatactcctttaattagtaatctttttgataatctaatgtattttaaaaagtagttaaaatacaaataataatctaattatatttaatataatcaattttttctatcgttatttattgtaataatctaattatagattatgttatatattttgtttttaagtattaatatatctattatcatcacaataatctttaattatctataaaaatacctaaattaggtaattatgatatatatgagattggaaaataaaatgaactctgatttatttataggaaatgcgagcgttcccaaagaaactcaaaaatgttataattatagttgaaaacgattccaacaaattgttatttgatatagctatttaattattgaattaaatgactatatcaagtaataaataggagagatagaaatgaaagatacagatcaaatacatactaaaaatactgaagaacaaggtattacactaccctatttaaaaaaagcagttattttttctattacatttggtttcttcggagtaaacatagcatttgcacttcaatcagcaatgatgggaagaatatttcaaacgctcggcgccgaccctaataatttaggttggttttttattttgccgccattagcaggaatgattgtacaaccacttattggatactattctgatagaacttggactagatttggacgtcggatgccgtatcttttaattgctggtcccattggagcaatcgtattagtcctactacctaatgcaggttcgtttggatttggatatgcatcacttatggcgttgtcatttggtgcaatcatgacgttacttatggatttgacttcaaatgcgtgtatgcagccctataaaatgattattggagatatggtaaacgaaaaacaaagagatatggcctggtcatggcaacaaatcttctcaaatttaggtggtattattgctacactattaccatttttactaacaatgatgggaatgaataatgtagcgcctaaaggggaagtaccgatgacagtaaaaatagcttattatattgcagcagcggtattactcattgcttctatttggacggttctttccgttaaagaatatgaacctaaaacatataactattatcacggcatttcagatgacaataggaatgagaaattaaatttatggcaactgttaaaaactgcgcctaaacaattttggcaaattagtgtagttcaattttttaactggtttgcattaatgtatggaatgcgacagacccttcttcagcaggatatcaagcagcaggaaactggtatggtgtgttatactgtatacaatttttaagttcagttatttttggttttgtcattgcaaaatctaaaccttctcaaagaaaattctggtatagttttggattaatttttggtggattaggtcttatttcaatgttctttattcataaccaatggttactcattatttcatttatattcattggtattaataacttaacgatgaatactcaaccattcacactattaaccgaagcaattgatggagaaaattcaggtgcttatctagggttatttaatacaagtatttgtctaccacaaattgtcgcttctgtagtaagctttgcacttttcccactattaggaagttcaatgcctgcgatgttattatttgcaggaatcatgatgcttctgggtgcaatctcagttaaatttattaacgcaaaatttgaatgaaatattaaaaaataaaaaaatttatttataatttgtaagagcgaaaaataatttttcgctctttttttataaaaactatcagcaatgtttcataaacaatatcatgatgtcattaaaaatttaatacatttaaggaatatcaaaccttgaagtataagtgaagacatactaatgattacgcggtaaatcactcgctatagaacatcattcatttaattaatattgacattattaaaaatctctgtacaatttaaatcgtaataattacgatttaaaaggagagaatataaatgagtaagatacctgtaactgtattaagtggttatttaggttcagggaagacaacgttactaaatcatattttaaatcatcgagaaggccgtcgtattgcagttattgtgaatgatatgagtgaggttaatattgataaagatttagttgctgatggtggtggactgtctagaacagatgaaaaattagttgaactatctaatggatgtatttgttgcacgttacgggacgatttattaaaagaagttgaacgacttgtacataaaggcaatattgattatatcgttattgaatctacaggcatttctgaaccagtacctgtagcgcaaacattctcgtatatcgatgaagcgatgggaatagatctcacttcgatttgtcgtttagatacgatggttacggtcgttgatgcgaatcgatttgttaatgatattcattcagaagatttacttgtggatcgtaatcaaggtgcggatgtgacagatgaacgttcgattgcggatttattaatagaccaagttgaattctgtgatgtacttgtattgaataaaacagatttagttacaaatgaagcgctagataagttagaacatatacttagaacattacaaccagatgcaaaaataattaaaacaacgcagtctcaagtagatattaatgatgtcttagatacaggacgatttgattttgaaaaagctagcaattctgcaggatggattaaggaactaacagaaggcggccatgagacgcatacaccagaaactgaagaatatggtatgaattcgtttgtctattcaagacgattaccgtttcacgcgaaacgtttcaatgattggttagaacaaatgcctcaaaacattgttcgttcaaaagggattgtatggcttgcgcaatataacgaggttgcgtgtttactgtcacaagcaggatcgtcatgtaatatcagcccagttacatattgggttgcatcaatgtctaaagaaaaacgggaagagatacttgctcaacgtcgtgacgtagcggaaagttgggatattgaatatggggatagaaatacacaatttgtcattattggtaccgacttagatcaagaaaaaatagaaaaagaacttgatgaatgcctggtgaatagtagcgaaatgaattctgattggcatcaacttgaagatccttatcgttggaaaataagaaaaccttaagaaataatggatattaaacaagttatgatgataaaaatattgattacaattttcatataaacatcatactacttttcgtaatatagtattgcaagcgcaatctaatactaaaacgaccaaaccttattataattacagtaggtaatcataatggaataaaagtatatatataattctcacaaacaacattatagtattgccttttatactgaaaacgataaaatttaaaatatttgattggtcattttttagttttatacaacaagagattaataaaattaaagaggaaacgacgaaattatcgtcacttcctcttttttttatggcatcattaattgaatacctctaatgatattttttaaaaatagcacaagtgcccatataaagaaaataactgcgatgaggattgcaataatccagccgataccgtgttcactatttacaaaagctggggaaatagatagggttactaatcctaataccaccataacccaactcatgatgtgattgaataacgcatttctagcatgggtcgaagctggtggttgtgcgacgatccatacaataagtggaaataatactggtgcaaagaagacacttaaatagctaatgcctcctaaaatatcactttctctataattttcatttggcatatcatgatcacctcaattctataaaaacatataataaaataaatagtaagtaagacattctaaaattacaacactgtaagttagtataagattgatgttgaaaatagttaattaaatattttgatgaatatagcatataaatgtattaaattgtacaatattaatatattaacttttaaaaggtggatatgatgcgggattttttaaaactgttaggggcattactaacagtgatcattacatttagcatttcaattttatttagtttcttaatacctctaatggtagaaggaaatattttaaacatggggaaattaaatcagccgacatttattatgttgtggattatttttagtgttatattcaatattattattcttattttagctttttcattgattcagtttagtagtgactttgtaaataaaatgaaattaatagcgacgctaaccttttttgtcattattacttatacctgctttagtcatatagatatgcaaggtttaactgatcatttaacattaacgagttctaaacatgcccgagaagtatcaatcaaactattaccatttattttaacgatatcattaggatgttatagcgctattttatcctacttacaacatcaaattgataaagaagaacgtaatatatagtttttgaaagcgttttacatattaatactcatttttttgaaacggtgctaaaataaaggtgagaacagataaagggggagattaaaatgttagcatacaaaaacattttaattgcagttgatggatcagatgaagcagaatgggcctttaataaagccgttgatgtagcaaaacgtaatgatgcaaagctcacaattgtgcatgtgattgatacgagaacatatactgcgtatgaagtgtacgcatctcaatttgacccgtctaaagagtattctgagaagttacttgaaggctataaagaacttgccgttaaagaaggcgtgacaaatgtagaaacacgacttgaatttggcccaccgaaattactcattcctaaaaatttagcaaatgaattagatgttgatttaattatgtgtggtgcttcaggattaaatgcagtcgaacgttttatgattggctcggtatcagaagcgattgtacgtcatgccccatgtgatgtattagttgtacgtactgaagaaattccagaagactttgaatcaaaagtagcaactccagcatttagaagacgatattttgaaagttcagaacataagtaatgatgacttaatatatgacttcattctcacgaagcagtgagaatgaagttttttattctggaataaagcaaatgattatttcagataatatataaaatatggtatcatttttatttaagtgtcgtgttctaaataatagcgcacaatcatttaaaaatctaagtataaaaggagtattatatcaacatgagtcaaatgaaacaactgtttattaaatttattgaaccattgacgaagatagaattttatcaaaatttactagccaatattttaattattgttgcttatatcttattaggtatgattgttattgcaatttctagaaaagtagtaacgaaattttttaaagtcaatgagaagaagaagacacgctataaaattaaaagaagtgagacactttcaacacttgttcaaaacttaattagttatgttgtttggtttattgttcttacatcgattctctctcgttttggaattagcgtctcagctattttagctggggctggtgttgttggtttagcagttggttttggtgcccagactgttgtaaaagatatcattaccggctttttcgttatttttgaaggacaattcgacgtcagcgattatgttcaaattaattcgtcaggtgtaacgattgcagaagggacagtacaaacaataggtttacgatctacacgtattcaatctgatactggagaagtgtataccttacctaatgggacaattagtgaaattgtaaattattctaagacagatgtatcgcctcttattgcaattccgatttctccaaatgaagattatgacgttattgaaaaagaattaaaagcattcttaccaacattaaaagataaatatgatatgttcgttgctacacctgatttactcggtttagatagtattgatggtaatgaaatggtaattaaattattagctcatgttaaaccaggcatgcattttccaggccaacgtttattaagaaaagaaatcataagttactttaacgatgtaggcattcatacgcctaaaccaacacttgtgaaattagaagatgaagaaaaataaacaaatgtttataataataggcttttaaatttttttcataagttttttataataactttttatgactaaaaatttatttaattatcatcatattatgaatgttatattcacgtttaccttaacgatagttttttctatttgtatagcatatatagtaaatcagtggaagtatggtaaatatatcgtgggtggtattggaagaatgaaatatgatactttttataaaagctataaaaataacttggtcgattaataataaaaattttataaataattaaataaatttagattattgaagtctgagacataattagttgtcttgggcttttttaatatattggtagtcgttgactgaattgaaaatacgcttgaatcaaacttttttgatactagttccgagatccattcaggaagaaggtctatgttcaacacaagttagatacgttgttggaatgggaagacgaattcaaaatgaattctatcccacactctttttatttttgattattgacaatttcaatatgaaatgcgattattaaaacgtaataattacgatttaggagagaagaaaatgattaagaaaagtttaatgttagtcttcatcagtattttaacgttgtcacttgtagcttgtggaacatccaatagtggtagtgataaagataaaaaatcagaaaacaatgaaaagcttgaggtaaaaacgacagtatatccactgaaatcttttgctcaacaaattggtggtaaatacgttcatgttgaatcagtctatccgaatggaatggatccacatacatatgagccgagtcaaaaacaaatggtcgatattggtaaatcagatttatttgtatatacaggggataatctagacccagtcgctaaaaaaattgcaaatgcaatgaatgataaaaacaaaacattatcattagaatcatctttaaataaagccgatttgttaaaaggcgaagaggatgaacatgaacacggtgaacacgaagaacatggcgagcacgaagaacatgagcatcatcatggtaaatatgatcctcatgtttggttagatcctgtattaagtcaacaatttgcgaaagatataaaggatgaattagttaaaaaagatgctaaacataaagatgactatgaaaagaattataaaaaattagttagtgatttgaaggatttagataaagatatgaaacgtgctgttaaaggtcaagaaggtaaaacagtatatatttcacatgattctattggttatttagctgatcgctatggttttaagcaagaaggaatcgaaaatatgaatgctgaagaaccaagtcaaaaagatcttacaactattgtaaaacaaattaaagaggataaggtaaactatatcctagctgaagaaaatgtgtcgaataaagttgcagacacggttagaaaagaaacacatgcaaaaacaatttcattttataatatgggttctcatactaaacaacaagataatgacagtaatacgtatcaatcatttatgaagaaaaatattaaagctattgaaaaagctttaaaaaatgaatcttaaaattaaagtatattaaagtaaagaagtaagatatgaagatcaagtaaattctatcttacttcttttttataggcttcctttttcaaaaaaaagtggtatattaaatttaaataatatgtagggcattatttattatttttatgaagtaagggtttatcactaatagattggaaggagacagcgtcatgaatatttatagactacgttaccaacaccataaagacattgtagatgacaatattttaacggtatttgtattggccaaaaatgaagaagatgtaaggaaatttgcgaaaacggtaaattacaaagttgaagatgttaaacatacaacatatgaagcttatgaagaagctaaagcaaaaggtgaaacatatcgccttgaacatgcagatacatatattagctaagtctgtataactaaaaattatataattaaggataaatatcaatgagtataaggttacacttaaaacttctttttgcataaaaaatgaatgtaatcatgcaaagagaagtttttttatatattattatctaacttttttaaaaattctaaagaaattgattttaaaaaaatgtataatatctattatgactttaagagggaaacgaggaaagacaatgaaacagaaacttacatttaaagagaatctctttattgggtcgatgctttttggtttgttctttggagcaggaaacttaatttttccacttcatctagggcaaatggcaggcgcaaacgtattacttgcgaatttaggatttttaattacagcaatcggtttaccatttttaggaattattgcgattggtatttctaagacgaatggtgtatttgcaatttcttcacgcgtaagtaaaatttatgcatacatatttacgattggtctttatcttgttattggacccttctttgctttaccaagacttgcaacaacatcatatgaaattgctttttcaccatttgtttctccaagcagtggaaaatggattttacctgtctttagtatgttgttctttatcgtagcttggttttttgcacgtaaaccctctaaaatcttagactatattggcaagttcttaaatccagtctttttgattttattaggtatcgtggtcgtacttgcattgattcacccaatgggcagtataagtcatgcaccaataagtcctgactacaataagagtgtattattaaaaggttttatcgatgggtataatacattggatgcactggcatcactagcatttggaatcattattgtaacgactattaaaaaattaggtattacaaatcctaatgatattgctaaagaaacagtgaaatcgggggccattagcattattggcatgggtgtcatctatacacttcttgcagtaatgggaacaatgagtcttggagaatttaaagtaagtgaaaatggaggcattgcccttgcacaaattgcccaacattatttaggtgatttcggaattattgttttatcacttattattattgtggcgtgtttaaaaacggcaattggtttaattactgctttttcagaaacatttacagaactatttcctaaaacgaactacattgtattagccactatggttagtgtattggcgtttatatttgcgaatgtcggattaacaaaaattattatgtattcattacccgtattaatgtttatttatccattagccattacactgattttactaaccttagtaagtcatttatttaataattcgtcaattgtgtatcgatttactacattatttacagtgattgctgcattttttgatggtattaaagcgagtccagaaccttttgtgaaaacaaacttcgcgcaatcattaatcggttttgctgagaattatttaccattctttgatatggggatgggatggattgtcccagcattaattggatttattatcggacttattgtttacaaagttcgtggtaacaaacacgaagttcaagcataattaagccatttactataagctataagaagttgaaatcatacgatcttatagcttattttttatatttttaaaggtataaatatatttataaaatgtattaaaatgaagataataatgattttgaggagaaataaagatggactataagatagataaaacatgggcaatcttttataaagaactcgcaaaaaaacttttaaatttccaaaataatcgtgacgacctaatagaaattataaaaaaaatttatgaagttactgatattaaatttccaacattagagcgaaataatgaacttacagatattgatccgttcacggtatttggtctgtttaataaaagttcgatgaaatcatctaataaaattaaaatattagataaaatgaaggaatttttccacattcaagccaaagtaccatatcattttgatagcatacctacaattaacaatatgaatgcaactttttactattttgaaggagaaagagaatttcaagatatagaaaacttgtggtcgttatttgaaattgctttattatattctaataataaagatgaagaaaataaaaataaatttattagaaagtttaaccttgttatggcacaaccaggaattggtaatagtaaattgacaagtgctttatattggattgattctgacacatttgccaatttagattctcgagcgatttggtatatttttgaagaaagcgaaatcagtacaaagtatatcaattttgaggttaacttaaaacaatcattaactgcgaccacgtatttaatgattattgaaaaattaaaattatttttaaaagaggataactatttgaatgattttattgatttaagttatgaagcatggcgcaaatcaaaggaagtcaagcaaagttcaaaagtaaaagatatcgatgcagataaggatttagaagtcgtgaattattggatttattctccaaaaccacaagatgttgattttgcttcttttattgagaatggagaaatgtctattggatataacgagttagaagatttctcgaaatatgcatctaaagaagagattaatcaaaaattacaacaattgaaccataatcagcatcattatattcatacggttaatgccatatgggaatttagtaaagaaatgaaacgtggggatattgtttatgtgaaaaaaggacagactgatattgtaggatggggcgttgtttcatccaatcatcaatataaaaatgataaaaatatcattcagcttgtttggaaggagaaaggaaactggaagattccaatcaaaacattaaataagacgctcactaaaatcacgccatatagtgaaacgattcggaaatttaatgagttgttttcagttgaacattctgatggagtggttgctacacaaacgacttatcccatttatacagcagaacaattcttagacgacgtatttatgaatgaagaagactatgacacgcttgtgcaattaatgagaagaaaaaagaatgtcatcttacaagggccaccaggcgtaggtaaaacgtatgcagcgaaacgattggcttattcaatgataggtgttaaagataaagaacgtgtgaaacttgtacaattccatcaaagctattcatatgaagattttgtgatgggttatcgtcctactgaaactggctttgaattgcgtaccggtgcgttttacaatttttgtaagcaagcagaagaagataatgagaaagaccatttctttattatcgatgaaattaatcgtggcaatttaagtaagatatttggtgagttgtttatgttaattgaaaatgataagaggggaatggaaatagaattactctatgcagatgagaaattctgtgttccagataatgtttatattattggtatgatgaatacagcagatcgaagcttagccatgcttgattatgcactacgacgtcgatttgcattttttgatatgaagcctgcctttgaaaccatacaatttaaacattatcaagaaaatttaaaaaatccacaatttgatgcattaattgatacaattcaagcactgaatgtcgacattcgagatgatgatatgttaggtgaggggttcgttattggccatagttatttcagtaatatggttgatgtcacagagtctgaattatcaaatattattgaattcgaaatgataccattattaaaagaatattggtttgacgacccttcaaaagtggatagttggaaggtacgtttaagggaagcgattcaatgattaacattcataatatttattatatgttgtcttacgcgtttacagttttgaataagaaaggctatcaacatatagcaacagaatcatttaataatgtggcagatttatatagtgcgctcctgattaaaggcgtatcgagtcaattaaaatatggtcttcaacatgactatttagaacacaatgactcgcttaatgtgatacgaggaaagattaatgtcacagcatccatacaacaaggaacaatgatgcataaacagttaaattgcacgtatgatgaattttcaattaatacgtatatgaatcaaattttaaaaacaacaatgcttaatgttctaaaattagatatttcgcgcacacgtaaaaaagcgttaaaacgactgctgatatattttgaacaagtagatatattagattatcgacatattgattggcagttacgatttgatcgtcatcacgaaacatatcgtatgttaatggctatttgttaccttgttacgcaaggacgaattcagtcagaaagaagcggttcaagagaaacgatgatgttcgaagatgaacaacagatggcgcgtttatatgaacggtttgttagggcttattataaaaaggaatttccacagttaaaagtcaccgcgtctcatattccatgggccattgatgatgattatcgtcacatgttaccgacaatgagaagtgatgtcatgctaacttatgggaaaaaatgcttaattattgatacaaagtattatacgtcgacgttacaacagtattttgatacaagaacgattcattctggaaatttatatcaaatatttgcgtatgtaaaaaatgaagcatttcacttaaaatcgaaacagataaatgttgcggggatgttactgtatgcgaaaacggatgaacaacttgtacctgataatacgtttcagatgagtggcaatacgattagtgtcaaaacattggatttaaatcaagattttattcatattgctaaacaactagatgatattgtatataattattttaagatataaaatagttagtagatattgtaaaatttcaacaatccatatacgatatatgcaaattaaaatgacaattttgacttataacaaaggggttaatgacaatgaaacacatgcatttatctgttttagcttatagtacaggtctacatcctgcctcttggagactaccacattcatatgttgaagaagttggagatattgattttcaaattaagttagcgaaattagccgaaaaaggtaaactggatgcattcttcttaggtgatggtcaatatatttctggagaagaaacgggacatatttcttattattttgaaccactaacggcgcttgctgccatttcacgtgaaacacattcaattggtttgataggtaccatttcttcttctttttatgaaccttatcttgcagcacgtatgctttcaagtttacatcaaatatctcatgggcgtattggggcaaatattgtaacatctcaatttgatttagaagcacaaaactactcgatgcaagctttaccacatcttgaaaaacgttatgaacgagcagatgaatttattaatgtaatgaaaaaattatgggaatcatttactgtagaggctatcgttaatcacaaaaactcaggaattggcttaaatcatcagtatattcatccacttcattatcaaggaaagtattttcaagttgccggagctattaacattccaacaccaaaatatggtcgaccacgtttatttcaagcaggaacttctattccaggtcgtgatttagcagtacgacacgtggatgctattttttcaattgcatggaatttacaagatggccaacagttcagacaagacattcatcaacgtgccatggaagaaaatcgtcaaccacctcttgtattaccaggtctcaccgtttatgttgatgagaatgagaaggacgcttataaacttaaacaacaattagatgatatgatcccacttgaaaaacgcaagaaacaattatctaaagccattggtctagatataagtgaatggacactagatgaagttgtgccatcattgccaccttatgatgcattagagaaaaaagttataaaatctgtttatgaagctgtacagcgtgctgttatgaccgaacaccttaccttacgcgatgtattagatcgatttggtacttgggtagggcataaaacgatagtggggacaccggaacaagtagcggatgaaatgattgaatggtttgaaaaagaagcgtgtgatggttttatgttaatgtcaccaacatatccaaacgcatttgaaaaatttattgatttagtcattccagttcttcaagcgcgtggcgtgtttagaaaagaatatgaaagtaatatgttaaaagaccatttaaatataaatacagagaaactataattaagcttctcttttatttaatagatatcatgaaaaaagacttcctccattagggggaagtctaaaatgttctttatattattccattttaactttcgctttgtctgattcttttttatatttttgatacataatccaaagaataattgcccatacgggtataaataatactccaattctagttgaactgttaattaataagataataaagataaatgcgaagaaagctagaatcgcaaatgccatatattttccgccaggcattttgaacttactatctttgtgtaattcaggattacgtttgacataatttagataggcaatcatgataagtgtccaaattaaaatattcaatactgttgaaaatatcgtaatttgaacgaacacttttgttgcatctttaaatactgcatttaaaataactgaaatacttaataagccgcatgtaactaaaatagcatagtgaggtacaccatgtttatttgttttatgcaagaatggtgggccttgtttacgacctgctaaaccgtacattgtacgactatttgcgaaaataccactattacatgatgaagcagctgctgttaaaacgacaaagttaataataccggcagcaaatggaataccaatcaggccgaataattttacgtaaggactgtctgctgggtttagtttatcccaaggtactacagacatgatcactgctaatgagccaatatagaaaattaaaatacgcgcaggtacattgttaattgcttgaggaatcgttttgtgtgggttcttagtttctccagctgtaattccaattaactcaataccaataaatgaaaagatagccatttgaaatgccatcaagaaaccttgaataccattcgggaaaaatccacctctagaccaaaggttcgttacgcttgcttgtccatatgatgttttcattccaagcacaatcatcacaataccaacaatgattaaggctacaattgttatcactttaataattgacagccagaattctaactctccaaatagctttgcactgaataagttcaaagcgactaatactaagatagtaaatgcagctgttagccagtttggtactgtaggataccaataccctacatatttcgctactgcagttacctcagccatacctgagataatccaagttaaccaatacgtccatccgaccataaatccagcaattggtccaatataatgatgggcgatatcgccaaatgatttaaatcctaagtttgataacaatatttcacccattgctctcataaacataaataatacaaaaccgacaataacataagtcaataaaatagacggtccggctaaatgtacagattcacctgatccaaggaacagtcctgtaccaattgcgccaccaatagcgataagttgaatatgtctattactcaactctctttgcagtttatcttctgccataattttcttccctttcatgagtaaccttatgactgaaactttatgactgaatccaataccctttgttataacataaataatttttctaaatttcaaattatttatttgttaaggttaaggataccttatttagttattgttaatcaaataatagtctaatagataaatgttaatacattattaactataattaataatgtattaaattgagtgtttttttaaatctataagcaaattacttctatttattttcaatttatttaataatctaggttacgtaattaaaatatgaaagtagggaaatgaatgaacgattttaacgaaatattggaaagtagaaaatctgtgaaaggatttgatccaaattataaaattccacatgaagaaatgaatgaaatcattagaaaggcaacaaaagcaccttcatcagtgaatatgcagccgtggcgttttgttgttgtagaaagtgatgaagcgaaagcaaaattacgtccattaattcgttttaatacgtcacaaaatgatacatcatcagcgatgattgttattttcggtgatttacaatgttatgaggaaggcgagtttatctataacaaagcggttgaggaaggacatatgcctcaagaagtaaaagaccaaatgttaccttttgtaatggatacttacaaaaatagttcacgtgaagttatgagtgacatcgtaaaagtggatagtagtttagctgcgatgcaattaatgttagttgcaaaacaatatggctatgatacgaaccctatcggtggttttgagcatgacaaaattggcgaagcattcggatatgatttagaacgttacgttccagtgttaatcgttgcgattggtaagaaagaaaaagaacctcatacatcatatagaatgccagttgataaggtagtagattaccaataattaaagtttaatataaaatatcaaaaaatatattttcataaacgattataaaagaaagttctttaaataaaaatttatgggaatatattttttctttaaaatgattaattcttttataaatgggaataactaactgtatcccgtaataaggaaacaatgtacataacaatgtatttacgataccaatctatatctaggagagataagtatggatcaatcaaatgaaaacaaaaaacaacaacaattagatgctctaagaaaaaataatgatggtacagcaatgactacaaatagtggtatgaaagtaagtgaagatgaaaattcactgacagtaggggatagaggtccgactttactagaagacttccacttccgtgaaaaaatgatgcactttgaccatgaacgtattcctgaacgtgtggtacacgcacgtggattcggtgcacatggtgaattccaagtgtatgaagatttaagtgaatatacaagtgctgacttcttaacacaccctgaaaaaacaacacctgtatttgtgcgtttctctactgtacaaggttctaaaggatctccagatacagtacgtgacattcgtggttttgctactaaattctatactgatgaaggtaacttcgatttagtaggtaacaacgcacctgtattctttattcaagatgcaattaaattccctgacttcgtacatgcgttaaaaccagagccacataatgaaatgccacaaggtggttcagcgcacgatacattctgggatttcattggtcaaaaccctgaatctatgcacgcagtattctgggcaatgagtgatagagggattcctaaaaacttccgtcaacaagaaggttttggtgtacacacatttagacttgtaaataaagaaggtcaatcttactttgttaaattccactggaaacctaaacaaggtttagaaagcttagtatgggatgaagcacaaatcttacatggtaaagacattgatttccatcgtaaagatttatatgaatcaattgataaaggcgactatcctgaatgggaattaggcttacaaattatcaaacctgaacaagaatttgactttgattttgatattttagattcaactaaattatggccagaagatcaagtacctgtgaaaattgttggtaaaatgacgttgaaccgtaatgtagataacgtctttgcagaaactgaacaagttgcgttccaccctgcacatattgttccaggtattgatttctctaatgacccattattacaaggtcgtttattctcttacacagatacacaaatttctcgtcttggcggaccaaactttaaccaaattcctattaaccgcccagttgcagacgttcataataatcaacgcgatgcaatgcatcaatcatatattcatcaaggtcaaacagcctaccataaaaatggcttgaacaataatgaccctcatacgacacctaaagaacaaggtggtttcgagcattatcatgaaaaagtagaaggttataaagtacgtcaacgtagtgatagtttcaaagattactatactcaagctaaattatataaaaacagcttaactgaagcagaacaacaacatttagctgatgcattttcatttgaaattggtaaatgtaaatcaacagaagtaaaacaaaatgctgttaatcaaattaataaagttgatcgtaaattagctgaatacgtagcaaataatgtaggtgtagaagttccggcagaaaacgaagaagtgcaatcagatgctaaagatagccaattaacattagaaaaatttgatatcccactaaaaggacactctgtagcagtgcttgtaaatggtgatattagcgctgaaacattaaaatcatatgcagaagtatttgttaacaacgacttaaactatgcatttgttggacaaacagctaaaaaccttaatgatgacgaaattggtattactgaaacttatagcacagcaagttcaacagtatttgatagtgtaatcgttctttcagacggtaaagaaatgttaccgactgcgattgactttgttgaaatgagctataatcataaaaaacctgttgtaatcactgaagaagcgaaaaatgtattacaaagtaatcgtattgatttagatgcgcctggtgttgtagtatctagcgaaccacaagctatccttgacgcattcaaacgttacagatatttcgatagaaaataatgaatgattttttgaaaaagcctgagacataatgtgttgtcttaggcttttttaatatattggcagtcgatgattgaattgaacatgcgtttgttccaaattcttttcaatcaacacaagttggagatacgttactggagtggacgataaattcaaaatgaatgctgtcttgcactcttttgagtaaggaggagatatgatgaatcgaggtattaatcatattggtcttacggttcctagtattgaaaaagccactgctttttttaaacagggactagatggaaaaattgcatatgatagtcaaactaaaaatgatgaaccaagaggtggcgaatatgtcgagcatatcttagggctagaaaaaggaacttcaattattcataaacgcatgatggtgtttggttgtggtcctaatattgaaatgtttgaattccaacacgctcaacaacatgaaccacaatcactacaagatataggttttacacatatttctttttatattgaaagtgacgaatttgaacatgtattagaacgtgtcaaacaggcaggaggagagccactatctgaaccacattctaatacaaaatatgagaatacagagaataataaaaccgtttatattcgagcgccatggggaagcttaatcgaacttcaaactgtacctaatggtttttattatccaaaagatagtgaagcgaaggtatttattcctaaaagtaacgatgagtaataaaatggacgcagtagtgcattacatttttcgacagtgacgattttgtgtacattttctagaaacagggtaataaactagaaagcctatcaaatggcttaatgacagtttaagggagtagaacaaatgattgatattcaaattcaaaaatgtgacttaattgaagtaattgaatcaataatcaatgaaaaagtcgaagttgacaatcaagatgcatgtgaatatttagcgactgaaattgtgaatggattagaaagctacaatagtgaagaaactcaagcaaataatttattaggattgaatagtgcattacgtcatgaagtcaaagcttctaaccactctaaaaagatcacactttcagcaaatgaagaagcattctcgtcaaacgataatgataataatgtagatgtacgttcatctaactagactgaaaaacttacagcactttatgacatcatgttcttacaaatcttacataataaaaagcacttcctaacgagtgaaaatgtcttcatctcattcggaggtgcttttatttatatgaaattagaaaaataatgctttaactattctgaagaaagaaccaagtaattgaaagacatcaccagacattagacaaccacctttccgcaaaaaattatattaagcttcgttagttgaagttagcgcttctgtttgaactaaatcatctgctaaatcataccaaaactgttgtagttcttctcttgaacgttttgtatctgtactgtcttgacctacaaaatcgacatgatcccagtcgtgtttagtaggtgttacttgccaaatacctttttgatttgtatcagttgcttctgtataagcttgattgaaaggatgttgagatgaaatcacagatacaagaccatcattttctctccattctttttcagtagctttaccaatcacatttcctgtcactgtgaatggtaagaacatattatagtctgctttttgttttcctattaaagtcggatgcgttgcctcagctgtatacgttttataaacgatatttggattaagtgatgttttgcggttaagatctgtcgcgccatcacgtgttaaatcataaaaaccattatctttagattgccataatttagagtttttaacgcgtaaaaggtaagagatgtagctttcaccaggttgttgttttagaccccattgagacaaaccgaagtctacacgtgaatttttattacctaatcgtttacctaaatcaaaaaccacttgacgaacaagtgcttcatttcctaattcatctgcagcgtgggtaccattatgcggtgtgcctaatgttgtaattgaagaaaccatattatcgtgtccaccttgtagtaaaggagaaatgtcaccaccatgtgttttttggtattcaatttcttcttgactaccatttcttaataattcttctaattgacgaacagtttgtcctcccatactatgaccaactagatgcactttttgaccaggttgccaatctttataaacgccttcgtatgttttaccatagcgttcatgtccatatctttctgcatgtgcagcaccataatctacagtaccacctttaatatagtaataaagttcaacggcacggtcatagttactaccaaatgcactgatacttgcttcataagcgttataaccattttgttctaaatcttgacgaatgtttaatttatcgccgccccaataatgtgataaaacattaggattgatatcatcagtaaatccattaaaaccatgaacaagaatgattggatcttggtttttgtattgaccttgtttagcaactttattggtttgatcttttgtttctgtcgtaccttgctgttgagatgtattatttgttgttgctactgcattattagctaatgtctctaagccagcctgtgaatttttttgatctttagcatctttatgtccaacagtttcatttgttgtaccgtcaattgagatcgcttcatctttagtgtttaaagtattcactgtaggtgcagcaggatctgtgggttgtttagctgtcactgtttgttttgtttcagttgtgtctacagtatcgtttgtttttccagtagatggtgcctctacgtcattattttttattgcatcctgatttacatttgaatcttgttgagtttttgatggtgttaattctttactctctgttagaggtgttgactgagatgtttttgttgaatgactgtcagttgtttttgaagtattgtcttttgtagatgatgtgttggtttcagcagtcgttgtttgagttgttgttttctcttctatcggactttcatttgtcacgttttctgaagagtgagcttgatttttagtagttgatgtttcagttgtgttatcttttttatctgaggctagtgtgtctttttgaattgtgtttttagtcgattcttgtgtttcaagagaaggttgctcctctttagttgaaactgattcagagtcatcagaagatgtttttgtagttgatgcttcttcagtttcagctactgaatgttttgtagattgatgagttacaatgttgtcagttgttccttcattagtatttaattgatcagtgctatctttaacttgagttgaagctttgttttcattatgtaagcgttgtgcttcattttcattagttactgattgagatgtagaagtagcttgttcgtcagattgaacattgtcttgttgtgtttcttgattatcagattgttttttatgatccccaatagattgtgctacagctgattcaggatttcccacttcctgatgtgtttctgctgcctgtgcagcaccgcctcccataaatagcaatgtcgctactaaaatggatgatgcgcccacactgaatttacgaatactgtatctattttgttttgttttcataaatagcacctctattaattgtttttttgttataaagtatatagattaaataaaaatattaataattgatcgtggtataaaaccgaaaaacttactaaatatcgctttaatatgttccaaagtaatcatcctttcttaaccaacaatttagaaagcgtttacaaatatagtgaaaaattgtcgtatgtagaacggagctacatacgagatttaacaatcaacgttgtcgattgaatttaaatagatggtaacgctatatgaaagcgttgtcaataatctgtcacaattatatagcgtaaatgtacattttaagaatatatgaacttgaaatatgtaataacatcataaattaagggggataaaaacctaataaagtagaccattccttgaaaattattacttgtatgtattcaaatgtaactcggggtttctaggagaacgaggtggcgtaatacgtctaccttttccaagaggcatttggataatagagaatgctaatataaaaagtgaaataaaaaagaaacctaagaatttaatcttaggtttcttagatagcggagggagaaggatttgaaccaacgcgagctaaaagctcctactaaccataaaatggttagcctcttaagccaggcttgagtatccctccaagattttactttaatactatactatatattttgaagtttgtaaagaaaaatattttctatgtaaataatttataaatgtacattaaagttaaaaataaattgttttataaaaaagacgcatactgtcctttgtttgttttataatattgatgtacatattttattttaaacataaaacaaattcatttctaaatggaagaaagtaggggacaaattaatgctaaaatctaaatttggtaaatcattagtagcgagtgtcattattggtgctagtgtactcggatattctgcccaacatcaagaggctaaagctgtagaaaccaactattattatgacggtatacaaagaggatcatatcaagcctatttaaaagcgaaaaaaattagtaacagtagtatttcaattcaacgctatccaaatgcctcgcaaaataatttaaaggcgattggtcgtgtatctaatttaaatggctggaaaaaaggctctcgcgatgcatcagtaagaaaacaggattctatgggaacaggaacagtgattggggctcatacatttgtaacaaatgcacacgtgatcgatgatcaatatggtcgtgcagcggctccgaaatatattaaatttcaaatgaatcgtgatggaagtcgtatgccatatgttttccaagcaacagaagtgattaaagtaccacaatatgatattgcagtggttcacacaaaacaaaatatgtctaaatatgtgaaaccagttaaaattgcaacggattcagagattaaacaattgaaattcaattcgccactttattcattaggatatccatggcaatataacgacaacacaaaagcctattttaataaacttcgtgtaactcaattttcaacaaatggtaccgagattcaaacgaaagatatttttagatcaggcgcttcaggctcgccaatgttaaatagtacatttacaaaaatgtatggcttaagaacatatggatataacttaatgggtggttcaacggatgcttatgctaaacaagaaatgtctggtggcgaatcgtttaaaggatatgctggtcgtttcgtacgtcaacatattaagtaattgatataaaaaaagtacatgctttagataatgaagtgtgtactttttcataacgacatacagagtctgtttaatattgtcagttgaatatatattttttattttaaaaggagcgaaataaatgaagaaacattacttagctatcggcgcaataacggcgacaactttacttgcaggttgtgatttaggagatatgattgggctcaataattctagtgaaaaatcagaacatactacatcacaaagtaaccaaccatcaaataaaaacacttcagataatcataaaaataatacccaacaagatagtaataaaagttcaaatgatagcaatcaacgagagaataaaacaaatagtaatatcgacaacttatctcaagctgaaaaagtagcgttggctttaaatgatccttcagtgtcaaactatgctattactgcaaatgaattaagaaatcattcatattttgcgaattataacggtggcggcgaacaaaaaagtatagatacgtatcaattagaagcattagacaatggagtagagggtgcaccaagtaatatgaaattctatgctactcagcctgctaaaggctcattttctacgcttattggagtaggaggcgatagggttacaattatcgcaacccaaagtccaggcacatacagtcaatttgtaaattcacaaacaggtcatgaattagatctccataccttacttgagaaatacggtgagaattctaattataaggagattgtgaatcaaatcgtttttactaatggaaaaacatatactgattcaaacaatacaactagtgaatcatcttcatctactgaaaaagtaacacgtgcaaatgtcattgataaggtagaagattatgaaggtcatcaattagatactgatacgtacacatataaagaaccagaacaagatgaaaacggagattggggcttctcaattttagataaaaatggagatttagttggctcatatatcgttacttctgacggtgtagtaacaaaatatgatgaacatggagatccaattgattaataaaaagcaacagctgattttaatggtcagctgttgttttctgtgtaagtacgtttaatttcatctaaacgctcaataaaactatcgatatatgattctggagcaataatttttgctagaggagcaagttgataagcaatataataagcatcaaatcgcgtgcaatttacccatgccaaaatggtgtcttcattacgggaaacaatctctttaattgaaaattgttgtttaaattgattccaaatggttgtactcatttcaaataatactgcattattcgcgaagtctttagaaaattttgtatctagaacgtgtaaggatgatatcgatttcaaagaaacagtatgtattttatgttgaaattcgtaagtaaaccaataatcataatgcatatacaaaatagataatggtttaatagttattttgttatgatctacttcaatacgcactctatgtttattgacgatggctttttgaagatccattaatagttttccaggaagtaaatcatcacgtactttgaattgatgtaacatcgtcatcaaaatatgtttatcttctattctgacagacgacagcgcatttaagaaaaatttgtaaatatcgtaatgaagaataggtgtgagactttgtaacttaatgagtaaacttagtacaccaagactttgtttgttcgtagtatcatgtgtgagttcataaccgcctaattgataattatagacgattttagtatgattgcttctccaaaaatgactttcataaaaaaatgtattaattgtattaatatcacgttgaatagattttttgctgacatttgtaaagcgatctaagtcttcttgagtaacaacatgaccatttaataataatgtcaacatattaagtatacgtgttgctttatccaaagatatatctcccttttattaaagtgaaaaagtttttaaaaataattatatagcttgtaatagagtttgttactatataatttgacaaaatattaatagttaaacattgattttaacattaatattgaatggataaagaatggtgagaccgtaataatgcataaactgtatctaacgatggggtagaaaggtgatgtgttctagccttacgataaataaaaccttgaattgcttctacttcaaggggctgatgattcatcacatcataatacatacttgtccccatatgatctggataaccagcatagatatgcataatatctgcaacaatcgtgtcaggcaatgtaataccttctgctatagcgacttgtttaccttcttctaataagcgcgtgcataattgatagacttccgaaatttttaaaatttgtgcagtattgccacctaatgcagtaattgaattaataccaagattgacaagtaatttataccaaatcgttgtttctatgtgatcttctaatataagttctattttagtatattctaaatagcgtttaagttgttcagtccgatgatcatgctgaatatgcaaacgggaatctctgaaatgggtcacttcatcgtcttttttctgtccactaatatagaccacagcttggtagacatgtttaaatggtaaagttgaacgcaaaccatatccattttgagctaagataatagttgtctcatcatgagtaagacggtttaagtctggaactaaagattcaagttgatgcgttttgactgccacaataataacatcgaaggagttagtcatagacttaatatctttaacaatgacatgttgatttgcaggttgaaagtgaatggacttatttgttcttccaagtaatgtgatatgaggtaatacttgttgtaattcgtaggcaatcgtcgtacctacagcgcctggtccaataatcgcaatacgcatttataactttcctttctttaaaatattacatataattatacgtgatattattgagataatgttataggagatcgataaaataatgaaaaatttgtcaaaacttatggaaatgaagcaaaatggtacaaaaatttcaatggttacagcatacgattatcccagtgcaaaacaagcgcaacaagccaatattgatatgattctagttggtgattcgctaggaatgacagttttaggttatgatacaaccactcaagttactttagatgatatgattcatcatggtaaagctgttcgtcgaggcgccgatgatacatttatcgttgtagacttacctatcggagcggtaggcgtaagtgcgaaacatgatttaaatcatgcgataacgttatatcaacaaaccaatgcgaatgcattaaaagcagaaggtgcccatttaactgacttcattaaaaaatcgacacaaattggtattccaattgttgcacatcttggtttaatgccacaaagtgtcggtgttatgggttacaagttacaaggtggtacaaaagacgcagcagaacaacttattcgtgatgcacatgccgttcaagaagcgggtgcagtggcgttagtattagaagctattccaagtgacttagctggattaattagtaaacaattagacattccagttattggtattggggcaggcaaagatacagacggacaagtattggtgtatcacgatatgttgaattatggcgtagaacgctatgctaaattcgtaaaacagtttgcagatttatctgtaggcattgatggtatgaagcaatatgataaagaagtgaaagcgggagcatttcctgcagaagcacatacgtataagaaaaaagtattagatgaggttaataaaaatgacacaagtaattaatactgtaaaagagatgcaaacaatcgcacaacgcataaaagcgtctggtcaatcaataggtttcattccaacaatgggtgcgcttcatgagggacatttaagtatgatgcgacgttcagttgaagaaaatgatgtgacagtcattagtgtatttgtaaatccattacaatttggacctaatgaagattatgatgcatatcctcgccaaattgataaggacgtttctttagttaaagctattcatatcgattatgtattccatccttccgttgaagagatgtatccagatgaattaggcgttacattaaaggtgggacgtctaggggaagtcttagaaggcccacaacgtcctggacattttgatggtgtcgttacagtagtgaataaattatttaatatcgtaactcctaataaagcttattttggtgaaaaagatgcacaacaattagcaattattgagaaaatggtaaaagattttaatcatcctattgaaattgtcggcgtcgatatagtacgtgaagacgatggacttgcgcgtagttctcgtaatgtgtatttgactgatgaagaacgtaaagaagcggttcatttaagtaaaagtttaacattagccaaagacatgtatgaagaaggtgaacgtcgaagtcatatgctcgttggtgcaataaaaacatacttacaagaacatacaagtggtcatatcgatgaagtcgcaatttatagttatcctgaacttgaagttgttaatgaaataaatggtcaaatttttattgctttagctgtcaaattttctaaagcacgtttaatagataatattattttagggagtaaataaagaaaatgattagaacaatgatgaatagtaaaattcatagagcacgtgtcacagaatccaatttaaattatgtaggaagtattacgatcgatgccgatattttagatgcggttgatattcttccaaatgaaaaggttgctatcgtcaataataataacggggcacgttttgaaacatatgtgattgcaggcgaacgtggcagtgggaaaatttgtctaaacggtgctgcctctcgcttagtagaagtcgatgatatagttattattatgacttatgtacagttggacgaacgtgaattaatcgatcatgcacctaaagtcgcgattatgaacgaaaataatgaaataattcaaatgattcatgaaaaagaaaatacaataattaagtaattaagtgagcgtgcagtcttaaagagattattttggaaagactagcacgctttttatataaattttcttaaaccctaaaaatagattgtcattcctgttataataggcgctatgttaaaaaaggagcgttgattatgacagaaacattaaaagacgaatggttaaaaaatcctggtaaaaatataatggcaggtattgttgttgctttagcactaattccagaagctatcgcgttttcaattattgccggtgtagatcctatggtaggattatatgctgctttcattattgctaccgttacagcgattgttggcggacggcctgctatgatttcaggtgcgacagcagcagttgcactggttgtaacaccgctagtcaaggattatggggtgcaatatttatttgcagcaaccattttaatgggattgattcagttattacttggtattttaaaagtaggacgattgttaaaatttattccacgctcagtaatgattggatttgtgaatgcattaggtattatgatttttttatctcaagttgaacatatttttggtatttctattgatacttatatctatgtcacgattacattattaattgtatttatcttacctaaattctttactatagtcccagcgccacttattgcgattgtcgttttaactatactttatctaaccatgggtgctaatattcatacagtaggcgacttaggtaccattaaacaagctttaccacactttactattcctcacgtaccttttaatctagaaacattaaaaattatcttcccttattcgttatctatggcgatagtgggactcgttgaatctctgttgacagctaagattgtagacgattatacaaatacctatagtaacaaaaatagagaggctcgtggacaaggtattgccaatataattacagctttatttggtggaatgggcggttgtgccatgatagggcagtcagggattaacgtaagatcaggtgcgaatagtcgcttatcaactttaacagcgggattatttttaattttcatgattatggtgcttggtcatatagtgatacaaatacctatgccagtgttagcaggtattatggttatggtttctgtaggaactattgattggggttcatttaaatatattaaacatgcacccaaaacagatgtgtttgtaatgattttaacagtggttattgtattatttacacacaatttagcactgggtgttgttataggaattgtatttagcgcattgttctttgcgactaaaatctcgaatattaaagtagagacaagaaaagaaaataatcaatattttattgtttttaaaggacccatcttttttgtgtcaattgatactatgatgacccaaatcgactttaatgttcaacgtgaaacaattcaattagattttagtgacgcgcatatttgggatgactcggctgtagatgctattgaaacaatcgtgcgtaaacttgaagataagcataatgaagtatatgttaaaaatttaaataaagatagtcggaaagtggtttccgagttaagtcaattaaaagaaaaccaacttatttaaaaagaagagtccgggacataaatcctggactcttctttttttgcaatttattattttaatcctacatattcttctaatgttttaccggattgatatactttggttgcagtatcttttcctaaataacgtaaatgccatggttcgtattgataaccagtaattttttcttttcctttaggatatctcacaataaagccgtatttatgggcgtttttcgcaatccattgaccttcttttgtttttccgaaacttgcatataagtttttatctgaattaacgccaccgatgtcaaatgtaagacctgtttgatgttctgagtagccaggacgtgcgctatacttatctgcagcttttttaccatcacgtgcaacgtagcgattgtatagttgtacttgagtaggataacttctgtaaccactcattttgtataattgaatgccatctttttgtgcagcactaaataattgttgtaaagcttgttgggcttttggatcttcaccaggattataatttgaaggaagaccgatatctttgtttacaattaagacaccatcgacatacgtacgaccatttttaatgacttttgtatgtctttgttgattgtcatcacttttattagattgagatgtttgtttagtattattttcatttttaccattattatcattactatgtgagcaagctgaaagtaataaagcgcttgttattaagattgcagagaattttttcatgcttaaactcctttaaattttaattgctataaacaataatgaaacattgtacacagtgtaacatagttttttaattatataagacacaacttttatgaaaaagtggtattttaacaaaatttatatttatcttccccttcaaataatgtataaataatgtatagtatattaataaaatgagaagaatgtatgaggggccaatagatgaaaaaaattttatttttgggtagtatcatgatgatgttattagctgcttgtagtacgcatgaatcttcaaaagaagatcataaatcaaaatcaaatcaaaataacgttcaaaaagctaaaaagaacgaatcagataaaaaagatgaaacgtcatcgaccaatacgtctaaattatccacgaaagaacgattagcattagcattctgtattgatggtgtcgatcaatatacattgactaaaaatgaaattctaactggaatttatgaatatagattacctacgggcaaacataattataaattagttgattttacattagttaaaatgaaacaaccagtaaaacatgcaccaaaacatatgcagttctttacggtttatccagataaaagtacctatcaagcgctaattggagttaataaagatacagtttatgtaggacgtatgcaaaaaggtacattggattataacgatttacttgataaaggaaaagaagctagtttagaagaagtatataaacataataaagataataaagctttaccagaacttataagtaaaatgcatatttcaaacgcgttacctgatagtgctaatgataaagggaatccgttagcttcaaatgatttagaaaaatctggtagtgtcaatacacgttatcgtaacgaagtgtatcaattaatttctgattttgatgaagtagaattaaaaaaatcaggttatttatgggatgatgtgaaaatgacagatcataatgggaattggattgtgaattatcgtaacaaaaaaggtgaaattctaggcacttatagaacaaaacatggaaagattcaaaagttagatgaaaaaggtaacattgtaaaagaagaaaaataaattatcgtttaataaaacgttgtgagaggattaaattaaatcttgtcataacgtttttcttattttagcagtacaatcaaacgctgtatcagttagaaaagtgattaaaggagcaccatggaatattgtgattttttcaattggtatgtatttagtggtctttggattgaagaacgttggtattataagtatgttaggacagatattttcagcaatatccaatcatggactgtgtacaaatatcatgattgtaggtttcatctcggctatattatcttatatgatgaataatttatcgaccgtgctcattaatgcgattgttattcgtcaatcacaagcagcgcatatacttaaagaagatatgatttatgctaatgtgattggatctgatttaggccctaagattacacctattggttctttagcaacactattatggctttatgtcttatcacaaaaggcaattaaaatatcgtggggcatttattttaaaacaggtattgtcataatggttccagtcttatttatgactttattagtattatatattacattacagctcttataaaaaagccaaaaatcaaaagatttatggcttttaatcatttaagtgacgataaaatataatatcaccgcgataactttttctgaataaggcattgacgatcaatatctagcatgatattcgtagggatatcatgaagtatgtcatgtttaatagtaaatattgcatagtcttctttgaaataacagtaagtgatgtcatttaataaattgttataaaaattgtaatcttatcatttacttataaataaggtatgataataaatatattttatattcaaagttcatataaaaaaggatgggatactatggaacaaaagaaagaagggaaatttaaattaaagacgccacatacttatgcaatattaatgtttattattctagttgcttggcttatgacatatattattccagcaggagaatatattagagaaaagaaaaatggacaaacattagtggtgtcaggtacatatcacactatttcgtcagaacacattaattttttaaatatttttagagcaattccagaaggacttataagtggaggcgaaattgtattttatgtatttttagtaggtggtgcatttgggatcgtgcataagacaggtgcatttgaaaatggcgtcaataaagctatgagaacattaggaagagcgaattttttaatgattcctttaactatgacggctttttcaattttaggttttacgattggtttggcagaagaaacgattatttttgttccaattggtattattattgcacgaacattaggatatgatgcgttgacaggagcagctatggtgattttaggggccgcgagtgggtttagtggaggaatgttaaatccatttacagtaggggttgctcaaactgttgcggaacttccgatgttctctggttgggggcttcgtaccatcatatatctccttatactagcaactgctattacaactgtcatggtctatgcaaataaagtcaaacaagataagacgaagagtattgtatatcatttagaacaagaagaaggacttattcaacaagatattgaatatcaacactttagtaaaaaacaagcaggtagtttaatcattattatggccacaataatatttaatgtttttggtatttttaaattcggatggggctttaatgaaatgagtgccaattttttacttgcaggtattttagctggatttgtaggtgggcttggtttcaatggaacatttgatgccttagttgaaggaatgcaaaatattctatttggcgcgatgattgttggatttgcaaaaggaattatcgttttattagagaatggaaaaattattgatactattgttcatggaatgacgacgttactaacagatgtaccctcatctttagtcattatcgcaatgttcatattgcaatttatgcttaacttttttatcccatcaggatcaggtcaagctttaacgactatgccattgatggtgcctatttcagatttacttcacattaatcgacaattgacagtgcttgccttccaatatggtgatgcaatcagtaatattctatttcctacatcagcaattttaatgggagccctagctgtaggtaaaatttcttatacggaatgggtaaagtttgtatggaaacctatattaatatggataatgatatgtagcgttgctatgtctattgctttagctataggttattaaggaaaatatacacctaaggtagactaacgtttgtctgaaggtattgagaagggcgtcttaaaaagatataaaagtaaaggtattaaataatgtctccctttaggatacttgttttaatcattaaagatagtttatagccttagtaaataaaatatataaattgttcttcagtgctactatttatggcagaaaggagtaaagttaaaactttgttcaaaagttcacaaacttttcatggtattttacatacaaagtgctaacataataattgaaagttatattactttaagaggtgtagtaaatgggcacttctaaaaaagtagcacttgttacaggtgcagcacaaggtattggtttcaaaatagcagaacgtttatttaatgacggttttaacgttgctattgtcgattttaatgaagaaggcgcaaaaaaagctgctgaagcactttcaaaagaagatcaagaagcagtcgcatttagagctgacgtatctgaccgtgaaaatgttttcgatgtgacacgtaaagttgtagaacattttggagagttaaatgtagtcgtaaataatgctggtttaggaccaacaacgcctatccatacagtaacacctgaacaatttaatcaagttatcggagtaaatgttggaggcgtattctgaggcattcaagcggctttagaacaatttgaaaaattaggtcatggcggtaaaattataaacgcaacatttcaagcaggtgttgaaggtaatgcgggattatcgttatacagtagtactaaattcgcagttcgtggattaactcaagttgttgcgcgtgatttagctgacaaagatattacagtaaatgcatttgcaccaggtatcgttgaaacacctatgatggaaggtattgctaaaaaattagccaaagaaaataatcaaccagaagaatggggttggaaacaattcactgatcaaatcacattaaaacgtttatctaaaccagaagatgtagctaatgtggttggtttcttagctagcagagattctgattatattactggtcaaactattattgttgatggcggtatgagactccattaatttaaacaaattattattttttaaaactgatatgcaccccaaaagttggacttaaaatctaacttttggggtgcatttttatattcttttagaagacatatctgtatatgatgaaatatttaaccttattgatgttcataatatatcaataataaatggatccatctaaattgtataactcattaaaaatgagtatttagtaaaaaataattaaaagacaatgaacgttttaattttgattgtttatgcatattatacatcatactccttaactttgttttaataaaaatatttagagattcaatcaaaattaaaaatactcttatttagataggatattttatatttaaaaaaataatgatatatagtaaatttaaatgtaaatatagtatataatatgattaatatcttacagaaaggaagacatcaatgagattaagcaatatgaatatagtttctggtatcttatgtatattatcatttctacttgcagtttcgattacatttacagatatgttttggtatttacctggcttttttgtcatgctattgtcagtggtttcaagtgttgtaggtctaatgagtggcagcaaagtatttaatagtatcacgttatttttaacaattattttctttcttattttttcaagtccattattacttgcttagaaaagaaaacgattttatatcatattaatatgaacggcaatctttacagctataatgtgaagattgcttttttaaattaaattaaaaaaacattgaaacgctttcaattaatacgtataatatttactagtttgaaaaaggaaggatattatatgaaagtaaataaatatttgatttttattttgggtgctttaggaggtttgctttacggttatgataacggtattatttccggcgcattactttatattcctaaggatattcctttacataatggtgtgatagaagggttagttgtatcatcaatgcttttcggagcgattgtaggtgcaggtggcagtggacctttatcagatagaattggtcgtcgtcgcttagtactatttatcgcattggtatttattgttggatcacttgttttagcattttcaacaaatattgtcatgcttgttattggtcgtgccattgttggacttgccgtagggggttcaatgtcaacggtacctgtatatcttactgaaatggcccctacagaactacgtggatctttaggttcacttaaccaattaatgattacaattggtattttagctgcatacttagtgaactatgcctttgcagatatgggtgcttggcgctggatgttaggtttagccgtggttccttcattaattttattaattggtgtagcatttatgcctgaaagtccacgttggcttcttgaaaatagaagtgaaaaagcagcgcgtgacgtaatgaaaatcacatataatccagatgcaattgatgctgaaattaaagaaatgaaagaaatagcttctcaatcagaatcaacattctcagtaatcaaatcaccttggttacgtccgacacttattattgggtgtatctttgcgatttttcaacaatttatcggaatcaacgcagttattttctatgccccaacgatttttacaaaagcaggtctaggtggctctgcttcaattatcggtacagtcggtattggtgtggtaaacgtattagtaacgattttggcattatttattgttgaccgtgtcgatcgtaaaaaactcctcgttataggaaacatcggaatgattgcttcattggttattatggcgatgcttatttggtcaatcggtattcaatcatcagcctgggtcattattatttgtttatcattattcatcgtgttctttggaatttcatggggtccagttttatgggtcatgttacctgaattattcccaacgcgtgcaagaggagcagcaacaggtattgcggcattagtattaaactttggtacgttaatcgttgcacaattattcccaattttaaatcatcatttagatacagaatgggtattcttaatttttgctgctattggcgtactagcgatgttctttgtaattaagtatcttccagaaacacgtggtcgcagtttagctgaaattgaacatgagttacgattacgtacaggtgttaaatctgaataacgtatgtatatcgctacttcaatgatttggagtagtgattttttatttttttaaaaaagggtaaacataaaaaaaacaatgctataaacggaggaattaagatgaaacagtcaaaagatttagaacgattacttaaatctttagacggacaaaaatatggcgcttataaacgaacgaaagggatatatcaatttgatcaattccgtctagctatagatcatgtccaagtcgatccctttgccccaccttcaaaaatgcgtgtcattattgggaaacatgagactgaaattcctaatgaattattagacactaaagataaacgtatagtgacttcagactttttaactcgagcagtggagacccagttaaaacatttcaatcgtacagtgaaaggttcaggtaaaaatgggaagatctttatcgatcatccaggacaagaaatactcgaacgtacatctgtagtgattaatgataaagaaattgaaatacgtattgaagttggactaccagcagctggacgtaagattctaggaaaagtagcatcacatacgataatacatggcattcctcaaatggtagaaaaagcgatacaatacgaaaatttaaatcaacaagcattgaacgaacaagtcgcattaaaactagaccagacctatattagacaacaacttgaaacagaacatttagtcgcatttgtggcaaatggttcaatcttgccaagaaaaagtggtgtgtcggacgctctaatgaaaggtgctattcaattcacaagtcctaagaaatttgaacatacattcaaccttccaagtggtcgggcagtcacagggatggctattccacaagggattacacttattgtcggtggaggttaccatggtaaatcgacactattagaagcgcttgagcgtagtgtatatgatcacattcaacatgacggtcgagaatttgtggtgactcaacatgatgcgatgaaaatacgtgctgaggatggtcgaaacgttgaaaatgtcgatattagtccatttattgataatctgccaggaaagaaggatacgacacacttttctacagaaaacgcaagtggtagtacatctcaagccacaaatgtaatcgaagctttagaagcagaaagttcattattattagtcgatgaagatacatcagctaccaattttatgattcgtgatggtcgtatgcaacaactgattgctcctgaaaaagagccaattactccattttctaataaagtaaaatcattatatgaagattataatgtttctactattcttattgtgggtggttcaggagattattttgatgttgctgaccaagtgttaatgatggatgaatatcatttaaaagatgtgacagaagaagcaaaagaaattgcgaatactgacggctataagcgagaaattgatggtgatcagtcattcggagtgctatctcaccgcatcccattaacggattctttctctaaaaaaggaaaagaaaaacgttttaaagcaaaaggattacattctattatgtatggtcatgagcctattaacctaacaggattagaacaacttgtggatgatagtcagacaaacgctattacggtgatgttagattactttagacgtcatggcatcaataatcagaattccataattcaagctacaaatgagatgtatcatttaattgagcatgaagggttagaagcgctctctcactttaatggacatccaggacatcttgccttacctcgtaaacaagaatttatcggtaccttaaatcgatatagaggattgaaagtgaaataatactaaaaaagaagttcttcaagtatataaaatgaagaacttcttttttgaacttaaataatatttttgactatatttccatctaacccaacaattttaatattgttagggtcttttaatatacttatattgtctaaaggattatcatttagaattataaaatctgcttttttattctcttcaatagttccaatttcgttttcatagcctaaacattctgctgcaactttagtggaagctaaaatagattgcataggagtcattccattttcaaccattagttctaattcacgtagattagtaccatgtttgaacactcccgcatctgttcccattgcaattttaactcctgcttctactgcttttctaaagcttttagaatgagccttaattacttctttagatttaataatagaagttttagacattcctaattcttctgcacactcaattactgagacaggcgctaaaagggtgggaactaggaacattcctttttctttcataccagcaatcgcttcatcgtcgagaaaaataccatgttcaatagaatgaatacctgcttctatacaatttttaatgccttgcgtcccttgtgcatgtgccattacttttctattgcctctaaattgtgcttcttgtaccataactttgagttcttcgactgaaaactgagtgaaattaggatggtcagtaggacttgtaactccaccagttgcgtgaacctttataacatctgctcctgctcgtagcatttctctgacttttttccgtacttcttcgacaccatcacaaataccattaggcaaacctggataatcttcaataaaagttggaagtaacattcctgattttgtcattttatcaccatgaccacctgtaattgtgagtgcgttaacactaatttgcattcgtggacctaaaattaatccatcttctactgcttgcttaataccttgatctgctcctaaggcatctctcacagtagtcacaccagcattaattgtacgttttaaatgatcaatagctttataaaaattatatgagaagggacgtgcaaatttttcattaattggccccatttcttcgataatatgaacatgactatctatcataccaggtaaaatatatttattagaaccatcaatgaattatcttcatctatatttaaattgtttttgatttttttaaattttccattctcaattaaaatatcaacattattttgaatttctttacctgtaccatcaattaaatttatatttttaattatcataatatcccaccttagttaaataaaattcattataatacctgtcaagactactgaagctactgtaacagttgtaaatccaccaattagcataggacttaataattctttaaataatgcttctttttcttcatcgtttgtagacactgaacgactcacttcttcacaaagtaagtaatcacctggaaaaccgtataaagcggttaaagctactggtaatgcttttgaatacttccacccaattaattttgcagcaatagaaccacctattaatattcctatagctcccattaacaaaattaatataattgctggaaggtgatgccataaatcttttggtgtaatagcacccattgatccgataacaataagcattatagcgactactaaaatagtaaaagatttatttttttctgcttcagcttgctcaaacaaccctatttttagacctataactccgaatgctaaactaataatcgaataatggatatgcgtataatttcctataacaaaagctaaagatgctaaagtgaacataataaataatcttaataaatcattttttaaaataggatattttttatgtaatgaatttgtgtgttccttttctttaattgaagaattttttgaatactcactttgagaaccggttgaaatataatatttaccatatcttttcatgaaaaatgaactaagtggtaacccaacgacactttgtaaaccttgtattaatgcaggtaaaacaattaaataatttaagtttaattgttttaatttatcaatagtaatcaacaatgcaactaatccaccagcaattggaccaactccagaagctgcagtcctaaaatcaaaaactaaagaaactactactaaaattagtgtggtggatcctagaattccaaataatgaaataataactgctttccactgtttctttaaagtagataaaggcatcatagttcccatgtgcataattgcaggtgcaattgctatagctcctaatgagggtagaattgcagttttcaaaattgagttaggtaaaataccagcccattttaataatagaaaactaaccattgctgttaaaagcattggcacacgtgctttagttaatgtagatataatttccccaaaagcaagtaaagcgaataaaatggttgcagaaataagaggttcatgcagcatacatatcacatcccttcaatataaaagtaatattatcacttttagataaatttgttaataaaaaattcagatttttctaaaaatttaaattattatattatctccttaataaaagtctgtttaatagtgaaatataaaactggaatatatactgaaaccgaaaaaataaaagagtggataatatgatatcattagaagtattgattctagcaacaaatgaagtaattaaaacattagattaaacagctatgtagcaaattgaatgcgcacatgaagtatttaaatcttggaagcgctgggacgcatatgaacgtgtagataaattatatataaatcgcacgaactaataatgaaagaatatggaaaatactaaaagaagattaaaaaaataaatatttatcgattggacatatgtaaatcatagactcacttttctttttattaaaggaaagtgagacttttctaattataatagcaaaagtattagggagtgaaacaacaaatttaaaataaattctatctctcaccttcaatattttagaaatatttggatatttatcatttgattaatcgcgcgagattgtttatactgaaatcaatcgcgaacgatagaaaagaggtgctgtgttgaaaaaggatgaaatgacattagcgaatcaattatgtttttcggcatataatgtgagccgcttatttgcacaattttatgaacaacaattaaggccatttggattaacgtattctcaatatttagttttactggctttatgggaagaagataatcgaacattacatgagattggtagacaacttgatttatcaagtaatacgttgacaccacttttaaaaagattagaacaatcaggatgggtcataagagaacgttctgaaactgataaacgtcaactgatggtgacacttactgaaaaagcacatcaacaacaagaagcagtttttgaagcggtagccgaatgtttaccttcaaattttgataaaacgaaatataaccaagcaaaagacgtattagaacaattagaacatggtttgaaacaactcaataaaaaataaagaagaggatgagttaaatgaaaacatacgacgttacatttattggtagtggacatgcagcttggcacgcagctttaacattaaaacatgcaggtaaagaagtagcaattatcgaaaaagagcgtattgcgggaacatgcacaaactggggctgtaatgctaaaatcttacttgaaaatccatttgaagtgttagaagaagcaacacactatcctggtattgttgaatcacaaaatcttaaagtaaattggtcaaacttaatggattataaacataaagtgattgatccaatggctggtcagttaaaatcattatttgaacaacaaggtattgatgtatatgatggtacaggtgtaattaaaaatgaacatacagttgaagtaaatggtgaagcgattgaaactaaaaatatcgtcgttgcgacaggtcaacatagcaataaattacctatcgaaggtaaagaatatacacatgatagccgtgacttcttatcgatggaagacacaccaaaaagtatcacattcattggtggcggaattatcagtatcgaatttgcatctatcatgattaaaactggcgctgacgttcatgtggttcatcatacagatgagattttaccaggatttaaccgtaatcatgtagataaattagttaaaaaattagaagatgaaggcgttaaattctatctaaatgaaaatacagctgcagttaaaaaagaaggagacgcgtttacactaacaactgaatctggattatcaatcaatacagaatatgtacttgatgcaacaggaagagttccaaatgttgaaggtattgggttagaaaatgtcggtatcaattatagtaaaaaaggtattgaagtagatgagtacttaagaacaaatgttaaaaatatttacgcaagcggtgacgttttagataaaacgattcctaaattaacgccaactgcgacgtttgaatcaaactacattgctgcacatattttaggtatggtacaagatgaaattaaatatccagctattccttcggtactttattcgcttccacgtttatcacaaattggtgtaactgtagaagacgcaaaagaaaatgatcaatatacagtaaaacatgtgccattcggtaaacaaatggtattcgaatataagaatgaaacagaagctgaaatgtatattgtactagatgaacataaacacttagtaggtgctgaaatctatgcagatgctgccaatgatttagtaaacttacttgtatttatcattaatcaacgtatgacagcggaagatttaaatcaacttatctttgcattcccaggtgcttcaagtggtgtgattgatttattaaaaatgaacatgttataagaatttaaaaacggttagtccatgtggctaatcgtttttttttataaaagaatgaaatgtttaaatttctctaaaacgtaaataactatattgtacgaaaaatgaaacgtcatctcatttggagggatttatattatgggtaaagaatttgaatcgaatggtgttaacgtagaaataccagatgaattagaatcagtcgttgcgttagaatattcttttgtagaagcattagctaaattagaattgaatgtcacaggtattgctgatgacaaagataaaaataacttagaacattctattaaacacttagtaggtaactatacatctgttggttcacgtttagagcctgatgcagaattgattaaaaaagcagaaccacaattaattctagcagataagacaagacatgaatcaatatttgaaaaattaaatgcggcagcaccaacagtattattagaaagttttgatgctaactacgatcaaagtattgaaacatttaaacaaattgcagaactcgtatctaaagaagataaaggccgtgaacttgttgttcaacacaatgaaaaagttgaagacttaagcaaagatattaaacttgataaagacgtatcaactattgctgctgtaccaacacatgatggcttatatgttcatgcatcacattcatatgttggacaattcttgcaaaaagttggttttaatggttctattcctgaagatatggagaaccacctacctgaatatatgggtgcagattacttaaaagtagatacagaccgatttgcaagcttcaatccagaacgtatattgattatggtagatgaagataacaaagcagattatgaaaaattaaaagaaactgaagattggttaaatattgaagcggttcgtaatcaacgtgtacacgatgtaaaccgtgaacgttgggcgaaatacagaggcttaatcgcatcagaattaatcttagaagacttaacaaatattgaagaataataattgaaaaagcgtgcatttcaaaatagtgaaatgcacgcttttattttaaatataaacatataacatgttgacttatttaaatattatagaagtaactaagagagtcacaccagacagacaaattgaagttatacatatcactatgaaaggtctgagtgcctttgaaataacttcttttaaaacgatattcaatcctagagcaaccatcgccattaacatacataccgttgtaataacatttataatattcataagtaatgaaggaataggaataaatgtattgacacaagccattaagataaagccactgagaaaataaggaatatcgactttttgttgtacttgacttgaatgtgacttataacgcatatacaaaattaagacaatgcttaaagggataagtagaaaaacacgtcccaactttccaattaaagcaagcttcatagcatctggtccacctactccggctgctaagacgacatgagcgatttcatgcaaactcacacctgcccaagcaccataagtcatagcaggtagtctaaaagtagtctcaatcgcggtatagataagagcgaatactgttccaactagagcaataataccgatactcattgcaatatctttttctttagatttaagaataggggccgttgctgcaatagctgcagctccacatacacctgttccgatggcaagtaatatagatatcggcttacttcctttaatcaatgtattaagaattaaagttagacttatagcaaaaagaataacaccgatatcaataagtagtaatttccagcctttacctagaatatcccccatatttaattttaatccatataagataatcgcaaattttaataaacgtttcgatgcaaacgtaatacctggacgaatgtgttctggatatcccatcacttggcgatatagcatcgcaaaaatgatagcaatagctaatgccccaatcgtatgtaaaataggaaatttagctaatatataactgatcattgcgatcataaatgtaaacataatacctttcataaatgaaggctgcgtgattgatttcatagtactttcacctcgatatgaaatcttagcacgttattgttataacgttaaataaataataagtatagtatatatatcaaaaatgttatattagacttaaaggagaatgatgcatggatccgtataaggtattaattgaagtaatcaaaacagaaagttttactagagcagcagaaaatttatatacttcgcagccttctgtgagtcgtgatattaaacgtttagaattaaaatataatattaaaatatttgaatttaaatctccatatttaaaactaactagagatggcgaaaagctattacaatacgcattgcagcgggaaagtattgaacaagaattatggcaaaacttaacatcggaatctgaaatcatctcaggcaccttaacaattggaagcagttatacatatggtgaatatttattatcagaacagcttaccagtcttatgcaacaataccctaagttacatattcatttacgtgttaataattcagattctgttataaatgatattaaacacaacagagtagatataggtattgtagaaaaggaaattcaagacaatgtaataaaatgtaagaaaataatagaagacgaaatggtgtatatttacaaaaagtcgcttcaacctagaatggatatatgtttcgttagagaaaaagggtctggaacaaggttttatcaggaagtaggtctttctgagttgaaattaaatccatatttggtagaaattaataatattaagattatcaaacaaatggtagaggctggaaatgggtttgcgattatttcaaaatcagcaattcatcccgaggattatgaaaaattaatgataacaactttaaatgtgaaacgtcactattaccttgctcaacatattgataaatatattgataaaaatattagagctgtcattgaaatgattatgaagtagagtatataaaaaaaggtggatctttctaaagattgaaaggtccaacttttttattaacactgcggggtgtcttatttattgttttttaattctaagaatttttcagctacagctttaccagattgtggattttgacctgtaatcacatgaccgtcaataacagcgaattgactccagttgtcacctttttcgtaatgtgcaccacgatttttaagttcatcttctgttaaataaggaactttatctgctaagccaactgcttcttcttcagtattagagaaaccagttacagttttaccattaataatagaattaccttcactatctgtgacatttaataggccgatagcaccatggcatacagaagaaactgcaccgttattttcataaattttacgtgttaattcctgtaaatctttattatctttgaagtcccaaattgttccgtgaccacctgcgtaatagataatatcataatcttcagcacgtacggcatctggtgtaagtgtactaccaagacgtgtcatgaagtctttatcttgataatatttccaatctaattcagacatcatatcttcttgtagacttgcaggatcgatagctgtatagccaccttctggactaatataatcgatatcataaccatttttgtataatacatctgcaaagtgaacgacttcacccaaccataatccagttggacgattcatatcaggatattttgaaacgcttgtaactacaactaatgctttactcattgtatacctcctaaattgtttacgtaattcataattacccatttttaaagaggaataacacatactaggtatattttttatatttatgttttttcagtatactccatctttaatgattcactttgatagagtaccatcccagtttttaatttcctaaaacctgctttttcatagaacttcacattgtttgtagtagagattaaatgaacacaggatagagaaccaatttgtgtaagaatatggttaagtatttgaatgccaatatattgagattgaaattctttttttactactaaatcataaattgcagcattgaatacaccatcagagagtgctcttgcaaaaccaattattttatcattgtaagaagcaagtgtcacaaaagtactattgttaaaaatttcgttaatattattcttattatgattagcccatccaaccgaattataaatttggtagatatcgtttagatatttttcattatattcactatataattctatattcataagatcatctcacaattatttattttgattcaattatatacaaattttacaaaaattgtttaaaaaagttaaatggtggtacatactagtatacaatttaccaattctatgaattcgtaaaagtaccctcactaatccatcgattagtgaggttttttgtattccaataatagataaattatacttgtagtaatctttaagtataaaaaggagagataataatggcccaagatagtggaaaattaaattggtcaagtttaatcattggtacactattactgattattgctgtggttatatttagtaatccagttcaaaacttctatacactgacttggctgattggcttactcattatgataggcggtgtcattcaacttttattccgtcgtacggcaaaaaaactcgtaggagtaaatacaaaattaattttaattaatggtattatcgatttaatctttggtattcttgttgtatttaatgttggagcaagttcagtattctttgtatttatgtttgcgttttggtttattttcagttcggttatcggtctgtttacactatcacaacaacatcaattacgtggtttatcaattatcgtaaatatcctagggattattttagggatgatcttattatttaatccaatgatgggtatgatttttgtttcaaccttaatcgcatttacattcgcagtcctaggtgtgacatacgttattgagggtctagcataatatatgtattcaaacatattaaattttaaactcttcactgatgtaaaagtgaggagtttttcgcttaaaaagcgtgtctactgcgttgaatgaaaagtaaagttgatatacagaatataacgtaagtattagaatgataattgataaaacacatgaacatgtttaggaggaactatcgtgaattacaattttgatgaaatcattgatcgtcgttatacaaattcaatgaatgtggaaggctacaaaggttatctttttggtaatgcagatacgtcagatttaaaagataatgatgaattgattcgtatgtgggtagcagatatggactttggtacaccagaagtcgtattaaatgcgattcgtgaacgtttaaataagaaaattttaggttacacaaacgtcttcggttctgaatattatgaagcttttgtatcttggacaaagaaacgttatggtttcacttttcctcaagagcacctcgtattctctcacggtattgtggctgggttaattgaacttgtaggttatatttgtgataaggatgataaagcattaattgttacgccgagttatggaccatttaaaatggcatgtgataaaaatcatatttcaacagtatattctccactaatcaatcatcatggatattatgagattgattttgaggatgtacgtaaaaaagtagaaacagaaaatattaaattatgcatttttgcgaatccacataatccaacgggacgtgtctggtcagaagaagagttatccacattaggtcaaattatgaaagagaatgatgtatggctcatttcagatgaaatccattgtgatatcaaacgttcaggtcaatcacataccccatttgccaaagctgtccctgattacgacaaaatcattacaactatgtctcaaagtaaagctttcaacattgcaggtttgatgttttcaaatatcattattcaaaatgaatcgcttctaaaaacttggaatacacatcactttggtacggaaaatcctctaagtgtggttgccacgcaagctgcttatgaaaaaggcgaagattggttacaagcaatgaatcattatttagacgataactttaactatttagcagatttcctagaaaaagaactaccacatgcagagtttaaaattccagaggcaacgtatttagcttgggtagatttaagctattatattaaagaaaaagatattgatgaatcaatggcgaaattctttattaaaaacgctggtgttatcattgaaggcgcagagcaatttgttcataacgcagagggtcatattagaattaatattgcagttcctagagaagtgatgaaaaagggactacagaaaataaaagcggctttagtttaaataggagggacatatcatggctattattgaaccctcacacataggtcatacaccatttcaacaattattaggtcatcacgaagacattatgaagacgtggtcagcattgagtgacacactagaaaatactagcgcgttaaacgcagaacttaaagaagagatacgccgtatgctagctcagaaaaatggttgccaatattgtaaagcaaaaggcaagcctaccgggagtctaacagatgaaaaatcagcaatatgtataggatttacagaagtctatatcaaattgggagatcaaatacctacaacgtacacagaggtcttaacgtctcatttatcagataaagaaattgtcgaacttattacgttcatcacatttacaaatgcccaacaacaatttggtgcgatgatgaaattagaaccttaaataaaaggactctagcttaggttagagtcctttaataattttcatttaaaataacattccccaaatcgtctgcaaagtatggttttcgataataataaataaaccaagtccaatatagaccactgccatgatccaacgactgaacttctctacagtttctccgatttcaggaatagatgcaagcttctgtgcagtaaacactaagacatagattaaaactaaaaagacgattagtgtcacaatgagttcagagacgcttaatgtgacaaagtaagggacaaataatccaatgttatctgctccgcaactcgcgatcgtcactaacgccaccgtgccaattagtttagttaatccgtgtttgtctagttcttgtttcgctcttttttctccttcacaatcatcaaaaatagctacttttaatcctaaatagataggaataagaccaagtaatcctaaaatccatttttcaggcacataatttaagacaaaggcaaagaataaacttacgacaatcaatgtcacagatcctacatattgaccaatataaatatttctatattctttttttgtctgtgctcgcgcgaaaaaaataagcaaaataacaagtaagtcgactgcagttgcgatatacaatatcgcagcagtaatgatagtttgaatcatagtttaactgtccttttaaaagtgatattgaataaagtataacgtatttcaaataagaattatatagattttattttaaaattttcaccaaatttttaatgtctacttgcatggaaaaaataaaaaaaataaatactaaataatttgaaaattcaaaatataaagtgtaaaatgaaaatgaagagattagaaagcgcttacaaaaatctctttatattaaaaataataaaagttctcttatggaaggaggcgttcattcatgagtgaatcatatgatttgattgtgattggtgcaggacctggaggctatgtagcagccattcgtgccgcgcaattaggtaaaaaggtggcagtcattgaaaaattcaatgctggaggcacttgtttaaatgtgggttgcattccatctaaaacattattagaacacggggaaaaagcacatagcattcaagttgctaatgactggggaatgacgacgaaagaattaaatatcgattttcctaaatttgtacaacgtaaaaagaaagtcgtacaaacacttacgggtggcgttaaacagttactaaagaaaaataaagtagcttatattgagggagaagcaagcatttcaaaagacctaaacgtaaaagtaaataatgaaacgtatcaaggtaaagatattattttagcgacaggtagtaaaccatttgtaccacctattgaaggattagataacgtcgattatgaaacaacagatacatttttcgatttaaaacaactacctaaacagttagcagtgattggcggtggtgtcatcgcaacagaactcgcttcatcaatggctgatcttggcgtgaacgtaaccattgttgaagtggcagatgatattttacttactgaaattgatgatacacgtgagttattaaaagctcatttagaaaatcaaggcattaacattattacaaaggcgaaaattaaaacagtagataaaactaaaattgtactcgatggtcaagatgacgtcagcttcgacacgttacttgtcgcgacaggtagacaaccgaatacacaagtggctaaagatttaaatttagagatggatggcaaattctttaaagtggatgaccattatcaaacaagtcaaaaacatgtctatgcgattggcgatttagtcaaaggttatcaacttgcacatgctgcaagtgcacatggtattcatgtagcagaaacacttgctggagaacacccaccacttgttcgtcaagagaacattacacgttgtatttatacacgacttgaagcggcatccattggcttatcagaagagcaagccaaagaagcgggatatgatgtgaaagtcacacaatcagcgtttcaaggtaatgcgaaggcgctcattaaaggggaaaatgaaggaattataaaattagttattgatcaaacatatggggaaatactcggcgcctttattgtaggacctcatgcgacagacttaattggcgaagtcctaggagtaaaagcgtcagaaggtaccatctatgaattatccgaaataattcaaccacatccagcattattagaagcgattggcgaaggtgcggatgcatactttggttctgcaattcacatgtagttattacacttacgccctatgaaagataggaggaattgacaatgaaaatggaaaaagaacaagcacgttggatttataaaacaatgaatgaaattcgattttttgaagagaaggtacacaaaatttttagtgatggtcaaatcccaggatttgtacatttatatgtcggtgaagaagccgttgccacaggtgtcatgtcacaactgactgacgatgattatattacaagtacacaccgtggtcatggacatgctatcgcaaaagggtgtgatttaaacggtatgatggcagaaatcatgggtaaacgtgatggtttaggacacggtaaaggtggctcaatgcacgtagccgaaattgacaaagggatgcttggtgcgaacggtatcgtaggcggaggctttggtcttgcgattggtgcaagtatttcaattatcaatcaaggtaaagacaatgttgccgtatgcttctttggtgatggtgccgcaaatgaaggcacattccacgaaggtttaaacttcgcttcaattttaaacttaccagttatctttgtttgtgaaaataaccaattcgctgaaggtacgacacacgactatgcaagtgcatctgaaacgattgctgaacgtgctgcagcttataatatgccaggcgtacgtgtagatggcatggatgtcttagaggtttataaagcaacacaagaagcagtagaccgcgctaaaaaaggggaagggcctacattaatcgaatgtgatacgtatcgtaaatatggtcactttgaaggtgacgaacaaaaagttaaatcaccagatgatcgtaatgcagataaaaatgccactgtagaattcagaaaacaagcgattgaagaaggttggttaactgaagaagaagcagatgatattgaaaacacagctgaacaagccgtagaagatgctgtgaaatttgcggacgaaagtgaattaccagatgaagattcactatacaaagatgtttttgcataacaaacctttaaagcactaaaacaagaaatagataagaacgaacctaaccagacgaggaggtttttacgatgagtgaagaacgtaaattaacatttatgggcgcgattaatgaagcgattgatcaatctatggagaaagatgaaaatgtcatcttaattggtacagacgtttcaggtggcgcaaaagtagaacatattcaagacgacgatacatttggtggcgtattcggtgttacaaaaggactggctaaaaaatatagtcgtaaacgagtgattgatacacctatttctgaacatattacattaagtgcagctgtaggatcagcagctaccggattacgtccaatcgcagaactcatgtttaacgattttattggctttggtttagacccaattttaaaccaaggtgcaaaaatgagatatatgtttggtggtaaagctaaaattccattagtggtacgtaccgttcatggcgctggcgcaagtgcggcagcacaacactctcaatctctatataatatgttcgcaacaattccaggtgttaaagtagttgtaccatcaaatccatatgatgcaaaaggattattaatgtcagcgattcaagacgataacttagttgtattttcagaagataaaacattacttggtcaaaaaagtaatgtccctgaagaaccttatacgattgagattggtaaagccaatgttacacgagaaggtgatgatttaactattgtcgcaattggtaaaatggttgcagtggctgaagaaacagctgaccgacttgaagaagataacgtttcagtagaagtcattgatttacgttcagtgtctccatgggatcaagatacagtgttagaatcagtgaaaaaaacaggtcgcttaattgttattgatgaatcaagtccacaatgtaacattgctggtgacgtcgcttctgtcattggtgatattggattcgattatttagacggtccaatcaaaaaagtaacagcaccagatacaccagtaccatttgcatcaaacttagaagcggcatatattccaaatgcagataaagtattagacgtagcatctgaattagttgatgacttaaaaaaggctaacgcgtagggaggtgtatcacaatgagtgaaaatattattatgccaaagcttggtatgacaatgaaagaaggtactgtagaagagtggtttaaatcagaaggcgatacagtagaagaaggcgaaagcattgtcacaattagctctgaaaaattaacaaacgatgtcgaagcacctacaagtggaacattactaaaaatcaaagtacaagcaggcgaagatgcaaaagtaaaagcagtgcttggtatcatcggagaagaaggcgaagacgtaggaagcgatgacgatgattctgaagaaactacccaagagaataaagataacgacacaacttctgaagatcaacaagcttcttcaaatgaagaacaatctgataaaaaagatacagaaaaagaagcgaagcctgaacaacgtgaccgtatctttatttctccgttagcacgtaatatggctgaagataaggaacttgatatcacaagaatcaaaggtacaggtggaaatgatcgtattacaaaattagatattcaacgtgtagactcagaaggttatgattacgaaggtgaagcgggtacgtctaacgaaagcgcatcttcaacggcacaaaacgtcgatgtgtctagtattggtgaaggtctaaatccaatgcgtcaacgtattgctcaaaatatgcgtcaaagtcttaataatactgctcaattaacattacatcgcaaagtcaacgcagatcgcttattagactttaaagctcgattatctgaagaattaaaagatgcagatcaagatgtaaaattgacagtcacagctttattagctaaagcagtagtcctagcacttaaagaatatggcgcaatgaacgctcgttatgaaaacggtgaattaacagaatacgaagatgtacatttaggtattgcgacatcacttgaagatggtcttatggtgccagtcattgacaatgcagatactaaaagtattggcactttagcaaaagaaattaaaacatcagctgaagcagtacgtgagggaaatacaagtgacgttcaacttagtggcgctacatttacaattacgaatatgggtgcaagtggtatcgaatacttcacaccaattttaaatttaggtgaaacaggtatcttaggtgtcggtgctctagctaaagaacttgttcttgaaggagataatgtaaaacaaatctctcgtatcccattaagtttaacattcgatcatcaaatcttagatggcgcaggcgcagctgatttcttaaaagtacttgctaaatatattgaaaatccatatttattgatgttatagataataaataactttttatcatgaagacccccaggagtctaaagtacttctggggctttatttatactcaactatcttacattataagttagttgacggagctattattttatactatcttatattataagatagttagtaaaaggtgatcacatgacaatatctaatcaaataatgaaaggacttttagatggagcaattttaggtcttattgcaaaaggagaaacgtatggatatgaaattcttgagaaattaaaggaacatcaatttcctgaaattagtgatggcagtatttatccagtgctcttaagactagataaaaaaggttatgtacatacaaccatgcgtaaatcggataatggtggacctaatcgtaagtactataccatttcagaaagtggactcaaagaattacagcaatataaagaaaagtggcaagcgctcaataaaggtatgaaccatatattcaggagtgataatgatgataagtaaagaaaaagaagactacttatttaagttaaaggctgaactcttatttagaggtaaagatgaacatgaggttaatgatattatagaagagttaagagatcatttcgaacttgccgaaaagaatcatgatgatgttagtgatattctaaatactccagtaaaagattatgctgatcagttctcagaatatataattttaactaggggattatttaaatacttagctttattttcagcatttatgctagctatttttattatcccaaacttttttacagaacaacttaatgtaacaattggttttattattaatattttatttatcttttgtataactacgattttaccttttttcttaattagaaagggtctcgtaaagtatggagagcaacgacgaatatatatttatgcttttatatggggagcagttatttttggtttcatcctattaagtacgtaccttacaaaacactatcccatttattatatcattacactaactgaatcaaaaagtgtgatcataggactgattctgttgttaattgtaatgattttatgttttgttttgaaacagcgtttgttcgctttagtgatatttattgtttgtttgccagatataattggatgggtagttaaaatgtacagtcgctcagaatctcaatctattattgtttcactgatcgtagccattgcgttattgttaatattgaatattgcgtttttcatctctacatttaaaaaacgtaaaaataaagtgaaggagtgattcattatgtcagaaaatcaaaatcaaggttgtataaaatgtggtcatacagaaatagaagaaggaacgttatcagcaacaggatcaggattgtctaaatttttagatgtacaacataataattttaagacgataacttgtaaaaattgtggatataccgaattttataaacaagatagaaacagaagtagagattttattgatttgttctttggaggataggtcaaaagaatagaacaacagtaacccttgtggttgctgttttttaatctttaggtaagacttcgggttgtgtgaagttagacttttaggtgtctaaaagttgtaaaactatttgatatattgacttgatatttatgggattttaagtcattgtataagtgtaggttaagtaacctataatttaataatctctgctaggggtgctttatattgctgaaaggaacatcatgttccaaccctttgaacctgatctagttaatactagcgtagggaagccagtgagtcactttacaataacatatggatgttttcataaattgatgaaaaggtcaatttaactattaatcattttcttcattatgatgcttacatatattttcgtatatattcacttattcttatgcattcagtattaagctgaatgctttttttatgaatcatataatcagtgatatttagacccttctagtatttaggaggcaatgtcaatggagcaagaaaaaatcaattttaaaagaacttttccagcaagtaaacgtatttttaaaaaaggtgagggtaaggatagtgatatctttgtaccatttcgagaaattgaactttctgacacccaattagaacaacgtagctttcaaaatgaacctgttgtagtgtacgatacagcaggtccttatcatgatgacagttatgaggttgatatcaatcacggacttccaaaggttcgtgatgcatggattgaagcacgtgaagacgttgaacattatgaaggtcgccgtattcaatcgattgataatggtttttcaaaagaaggccataaaaactatgtagctcatccatttgaatatcaaccaagacgtagcagtaaagagacacctgtgacacaaatgtactacgctaaacaagggattatcactaaagaaatgaaatttgtagcaattagagaacaagtggaaccagaatttgtaaggaaagaaattgcgagaggacgcgcgattatccctaataatatcaatcaccctgaatctgaaccaatgattattggtaaaaacttctctgtaaaaatcaacgcgaacattggtaactctattgtgtcttcatctattgaagcagaaattgaaaaattagtttgggccacacattggggtgcagatacgatgatggatttatctacaggaaaaaatatccatacaactcgtgagtatctcttacgtaactcacctgtaccagtaggaacagtgcccatctatcaagcgttagaaaaagtaaatggggtagcagaagatttaacatgggaagcgtatagagatacattaattgaacaagctgaacaaggggtcgattattttactattcacgcaggattacgtcttcactatattccattaactgttgatcgtttaactgggattgtttctcgtggtggctcaattattgcacaatggtgtcttgcacatcacgaagaaagctttttatatacacacttcgatgagatttgtgaaatcttaagtaaatatgatgttgctatttctctaggagatgggttgcgtcctggttcaatttatgacgctaacgatgaaagtcaatttgcggagttgaaaacgttaggtgagttaacggatattgcttggaaacataatgtgcaagttatgattgaaggtccagggcatattccaatgcataaaattaaagaaaaccaagatttagcagatttctattgtaaagaagcaccattttatacattaggacctcttgtaacagacatcgcaccagcatatgaccatattacgtctgccattggtgctgctcaaattgcgagccatggtacggcaatgttatgttacgtgacacctaaagaacatttaggtttaccaaataaagatgacgtacgtgaaggtgtcgtcacttataaaattgctgcacatgcagcagatttatctaaaggcttaccaggggcaacagaacgcgacgatgcaattagtaaagcacgctttgagtttcgttggattgatcaattcaaccttgcattagatcctgatcgagcaagagaatttcacgatgaaacattacccgcagaatcagcgaaaattgcacatttctgtagtatgtgcggaccaaaattctgttcaatgcgcttatcacatgatattcgcgattcctacaaagaacagcttgaaggcatgaaagagaaagccgaagaatttagagaaggcggcaatagaatatatcattaatgataatggtaaagaggtagcgatataaaatggctacctttttttaaaaaattcttctagatatacccatttcgtctaactactgatacgatagtgttatacatatttccagggtaatattgctaggagggtttagcatggataatcatgcagaatttaaaaaaggaattttatttgcgttaggggcgcatttattatgggggatcctccctatttattggagattcattcacggtattagcgcatttgaaattttagcgtatcgcattatccttgcgatggtttttatgattctaatgatttttgtattaaaaaaattacaagtgcttaaacatgatatcaatcaactcatagcacatccgattcaactggttgcgattatcattgccggttatgtcatcacgattaactggggaacgttcatttgggcagtgtctaatggtcatgtgctacaaactagtttaggttattacattaatccattggtgagtgtcttactcgcatttattttcttaaaagagcgtttcaataaatttgaaacgttagcaattgtatcagccgcaattggcgtcatttacatgacaatgaagataggagaatttccaattatttctttaatgttggcattctcatttgggatttatggtttactaaaaaaattggtacgtgttgaagcgatgagtgggattgcgattgaatgtattgtgacagcaccagcaggactgatttatatcatttatttatggcaagcacaccaatcatcagtcggtttgaatataagtacatttttactcttattctctggagcggtgacagctgtaccacttattttattctcagcgggtgcgcgtcgcattccactatcactgacaggatttattcaatacgtcagtccaacgattatctttttactagggatcttcgtatttaaagaaacattcgatatccaccaattcattacatttatctttatttggattggtattgcgctttatagtatctctcaatatattaaaatgaaacgtagtcctagaccagaataaaaaaaagcatccctttactatcttgtatagcaaagggatactttatttatcatataaaaattgatttaaattatcctaatgatccattagcgccagcactttcttcctcagcgctatttatatttttccatagaacacctaagaatactgcagcgattgctacaacacctacatattctacaattttacgtccaggtgatttatatccagccataatatgacctccatttataatttttacgtaatgaattcgcatattaaggtattcccgtttttaaatttaaaaaacatttccactgttaattttgataaaggtattgtggagtgaacaagatacatagctacaccaatcaatgatcttcattatagaccctacctcatttgaatctaaaaagcctacacatttttatgctacatagtttttaatttttttattatttacatttctagcaattgatatcatgtcctggtgctttttaacgtttcataggaagactactgatatagacagaagtaccgttaatagaatgaagcagaagtatgacaaataaacatagacattatctattaagtttcttcgcaaagtaagcaaaataactcatcattatagcgaaaatgacggatgaaatgaaacaacgcacaatacctaaatctaattttaatagtcgttgtgctaagtaaaagattataaaataaacgataaaaaaatataggaaataacgtattgttttcattagtaatctccttatcaattaaaatatgtatgatttaaggctaacatgtattaaatataaattaaaaataatgaaagaataaaaaagcagagtaatattataagtattatataattaattagtcttttaattaattatttttaaataaaattatattttaatttataaaaattttgaatttatgagtgtaatattatatattaaaggtggaagttcattataattctataagaggagtgatccataatgaagaaatttgcaaaagcaatggtcgttggtggtattactttaggaacagtattagggtttaatgtaactgagcataacggtgtatcaaatgaagcacatgcacaaacacaaacgtcacaaggttatcattatcattatcaaggttatacaaaatcaggtggcgaattcgtattaaatcacacgttctataatgcgttaaaagctggaaatgtgacatttaacggaattaaagtgaataatcagtatcaaaacggtacatcaacaaaaaaagtatacgaccaaacatttaatcaggtcaaaggtaacacagcagcaatggttgattttaaggtcgcacctaaaacagtaagcttagaacaagtgaaagacgtttatggagctcattatcaatatcaaccatcactaactaagaaacaaacagatgaaacaaatggattatacggttacacagtaggtaaaggtcatattacattccatgttacggatggctacgtggatcatgttactgtgtcataatagaagatataaaagagcagcacctcattgtgaggtgctgtttttttgttaatcgagtgtattgattaatgtcataatgaaagtcaatatacaagcaatgataatgactaactttcctttttctgttttctcatgtccatgttggtattctcgtaaaacaaataaccatgaaatgataactagcaatcctaaaacaatactaataaatttcatgtaatgatctccttgtacatctagaattcttgtttcaaacataacgtgatttaaaataacaatcaactatcattttcgtgcaattacaataatgataaaaggcattacgattatttattatagctgaaattttaaaagtatatttagaaagctacgtatataatttgttaaaattataatttaaacatacctaagacacttatttatattctaaatttttacatatgagaataaaatataatgatacaaatagttttagaaatagattaatataaaatgttaaccttaatatatggataaaaaatattattaaaggaggatattcatgaaagattctatcttttggaagaaatcatttattcctgtgtatttcatcgtggctttcttattgtttattctttttaaattttacatacagactgataacttttctatatacatactcatttttattgtactcggctttggaatagcgtctgtgatttataattctaaaagtaaatattggaaatgataaataaagagatcatctaagaagttaagtatcttagaaggttgggatattttaatgatgaaaaagtattaagtatagcattaattagtactatattattaagtgcatggtcgataaacattagttgatgaaaatcgagaggataagaaacagacacaagaatcacataataataaaaaccataatcaaaatactctgcgaaagggatatttaaaattatgtttgtgataacgttttgttggaaaaggaagattaattttgaaatttgttttatatttcgtatatttctttgtttctttttttattttaaatttgctacttgatttagtgatacccctccttgattttgatgtatatccaagtcttatttctgcattgttttttgcaatatttatgactttatttacttatgttttaaaaggaaataaaagtaaaaaataaaatgcacatttatgacaagaagatttgttttgtgttgagaagaacccttaactaaacttgcaaacgaatgttggcatagcgtgacctattaagtcgaccattcgacaagttttgggtttgttatgggttcggagattcaacgtcaatagagcaattggaataaagtaaaaattttgaaataatataaatatcaagaggtgatttattattcaaaataacagaattgatattaataagctcagtacatttcatcgtatttcgtttgttatgaatattttctttttaatttttatggctccaatttatagtctggataatgtctacttatcagttgcttggactattttgggtttaataaatggtgtttatttattagttaaacaaagacatggaaatactaataatcgtatgtgatgtactgataaaaagagcctaaacacaggctcttttttattttgatcatttttcacataaaacgttttgatttttagcccaactttttagatttgttacgccattaagattttttgaatttgtgtgtattgttatattttcgtttttgtcgatttctctttcacaatgactgcattttaatttttcaaaaaacataaaatgacctcactttttgcgattttgtattcttttgtttgtatttaattcattaaatttgaaagcatatcagctacatatgtttcagtaaatgctgctaatataaccaatggtaaacagacgaataaatatgcttttaataaattaaataaacttgttttgaaagagtagttttgctttttttcttttctgaatagattggttatttttcttataattgatttatttagcatataaagaccactaataaatatacaaaaactcataatttctaaagtgtaatggggtatataagcgattaagttagttagacctttgtaagtgtcaaaatgtatgaaaaaaccaaatagtattccaggaataataagcgatactatcaggtttaaagtatataaaaatggtatgggtattaatgctaacaaaaacatttgtattggaacatgaaagccattattttgtataaatccccaaactttttttagaccttgtgttttactaacgctttcaggtgaattggatcctaattgttttataaattcttctgaaggatgaaaaaataaagcgattggaattgtcattagtagtagaattgttgatagtataaagaaatttaatgctcttttaaaataattttggtctttaatatttagcataattaaccctttcttttttgttttttgaaacgagtatcatgagtttcttcctgtccagataattaataactttataatagaaagtactatatattgaagtgtattttatttaaaagttctataaacatttaaagtactgacatctatcttttaatatttgatataactcatttttacatagctcctgtttttaaacaatactgacaaatgagtcatattttaaattttataattctatttatatcaatatgttcgtagatgacaaaaatttcagtattaacaaatattaacgctattgatataaatatagtgtaattgaattttgaaaacatttttatattactcgttgatattgtaaatgtatgaaaacaagaacagccacagtttcctaattatgcctctggaagctatggacctaaagaaagtgaaaaaattacttagtgaagacggattgaattggtggaataatttgtaatataaaagacttaaagttgtcgtcttttgaatgagtagttaatcattgattaatatgcaataatcaatgttgtaaagattataaagggaggatacttaatggattttattaatattacaggtgcttcacaaaataacttgaaaaacatagatgtaaatatcccaaaacacttagtaaccgtatttacaggacgttctggttcagggaaatcatctttagtgtttaatactattgctgcggaatctgaacagctactaaatgaaagttattccagttatatccaatttcatttaaatcaacaacccagaccgaaagtaaaaaaaattaaaaatcttcctgtagcaatgacgattaatcagaaaagattcaatggaaattctcgctctacggtaggaacagtttcggatatatatgcctccgttagattactgtggtctagaataggcgaaccgtttgttggctattcagatgcatattccttcaatagtcctaagggcatgtgtaaaacttgtgaaggattaggatatattgaagacattaacttagatgaattgctagattgggataagtctttaaatgaaggtgccatagactttccttcttttggaccagataaagagcgtggtaaagcctatcgagatagtggtttatttgataataataaaaaattaaaagactatacaaaagatgaattagaattatttttatatcaagagccaatgacgttaaaaaatcctcctaaagaatggagaaagtcagctaaatatgtaggtctaatacctagattcagtagaatatttttaggcgataaagaatttaataagaaacgctacgccaaacatcttaaaaatgtagtaaataataaaatatgtcccacatgtaaaggtcaacgtttaaactcgaaaatattaagttctaaaattatgagtaaaaatatttctgatttcacacaaatgacaattaaggaaaatttagagtttcttaataaattagaagattcaacagctaaatatattattgatcctctcaaaaagcagttagaagcactagaatatattggattaagttatttaacgcttaaccgtgtcacaacaacattatcaggcggtgaagcgcaacgtcttaaattaatacgtcatttaaatagttctttatcggatttagtttacattatagatgaaccaagtgttggtttgcatccggaagatatagctaaaatcaatgaaattttaaaatctttaaaagacaaaggcaatactgtgttaattgttgaacatgatcccgatgttattaaagaaggggactatatcatagatatgggaccaggttcaggaaaaaatggtggtgaaatcacatttgaaggaacatataatgaattactctcttcaaatacttcgacaggtaacgcattacgtaacaaacataatttaaaagagaatattcgtgaagcgaaccatttttataatatcggtcctgtgacacaaaacaatttaaataacgtaaaaacgtctatacctaaacacgtattaacagtcttaacaggcgttgctggttcaggtaagagtactcttgttaaagcaggttttgaaaataatgaccataccatctttattgatcaaaaagcagttcaaggatctaatagatctaatctattaacgtatttaggtgtttttgatagtgtaagaagctttttcagtaaagaaacaggcttaaataaagctatgtttagttataactcaaaaggtgcctgtccaaattgtggtggaaagggctatattaaaacggaacttgcttttatgggtgatttttcacagacatgtgaagtttgtcatggtaaacgttataaacaagaagtattagatgctaccatagatggatattcaatcgccgatgttctcgatttgacggttgacgaagggattattttctttgataaaaagaatgatattaagtcaaaattacaatcagtaagtaaaacaggtttgaattatatgtcacttggacaacctttatccactttgtctggtggagagattcaacgcgtgaaactagcacaacatttagatgaagagataaaagatagtatttttatttttgacgagccaaccacaggcctacatgaatcggatatccctatattgatggagtgttttgatgatttaattgatcaaaacaatacagttattttgattgaacataatttatcgattatgtgtgaagcagattggatcatcgatgtcggcccaggccctgggttggatggcggaaaggtccaatttagtggaacacctaaaaactttattgatagttcagaaacattgacatctaaacacttgaaacgctatatcaatcagtagaaatagaagagttggatgagtttatatttattatattcattcaactcttttcttatcatagattctttcaatatagaaatattgaaagaattgtctatccagtagttccaccaaaagttgagtataagttaacaaacataggaaaaacactcgataaagtagtttatgcaatttgtgattgggggggatgaatttctggaagaaatttctaaatagaaaaatgttaaaatttaaatatatatgtaaaagacgcctcaactttgaacgagttattcaaagtaaggcgtctttatctatatagtattgtggttttaaaataactttaatagtattatcttttttctgatcaaagatgtcataaacttcttttacatcttctaacggcatagtatgagtgataatttctgttggattatttacttcacatacttccatatttttatatccttgataagtaactgacttcatacaatcatcctcttttagcaaatatgcgcctgttattaaaatacaaactcaaacgagtaaattaagtatttgcgttaaatatacataatttacatataaatcatgtgaatttattgaatataatcatcttttttaaaaaatagtatctataacaaaaggaggatattccccattcatttcccatcaattttattttcttatatggcctcactatctcagaatatcaatgtaactaatttttctactatttaccccaaaataaagcttaaaagtggatatattaatattactccaacaatgatttcaaaccatatagaagaatttgaaaaaatataaggaaagagaaaaacagaaaataatacataatttaacttattcgaagatgatataatatacaggtcgcctatctctcaggcgtcaatctagacgtagagaggaggtgtaattatgcttgataactttgttcacatcatgaccacagcagtgagtggttgtatcgtcgcattatttgcgcattaactacgtaatcgcaacgataagaaaaaataggagattatagtcacacctaaaaatcccctcactatcggaagtagtgaggggattggtaaattacgcttaataactttgataagtagattataacactggttagtatagaaattcaaagtggaaagattagtattacaaaaaacgtaataaaacaagcatggattgctacaaaatctaacgtttttcatgtttttttgtcctctgaaggaactatacgattagacggcacgtttatccagcctatatgccaattttaaatttgcatatagatgagcattgtctaaaaattcgtcactggttttgctcagatttttgtttttgaaattaaaatatatttatttggttctcatttgcgttttaagagtcattacatagttttaggtgaaatgttatataaaacacccctaaatgatctaaaaaagtgtcttaaaattgtaaataaggatattctaattttttataaatctcaagtagtgattaaaataaaaaataaaccaatttgtaaaatacaaactggttttgtgaattatgcttattttgctttttataaatttaagctatcataaaaaaagcaatgtgttattttgaaacaaaaaggagtttttgtgatgataactaagagtattaaatatccttatgcgaaattaacttttgatgttttaggtatcctttctagtatcacttttttaatattaattgctattaatttctatgctgattttaaaagtaatggtacttcgaagataggtgttgaatggactggaaatgatttcgttttaggtattgttttaatttgtattattttagtgtgtgctataacttcttttattttaaaatcgataaaaaacacgaaataaaaagtagaatatgtgtttatgccgagaaaatttattgaagttgagaagaacccttaactaaacttggagacgaatatcggcatagcgtgagctattaagccgaccattcgacaatttttgggattgttaagggttccgaggctcaacgtcaataaagcagttagttttagtaatctaataaaaaaggagtggctttatgggtattttgattaggttggaaaatgcatttgtttttattactgctgtgattatttactttatgtttggtttttcattatggctttttttaatatttttgctagctcctgatatttctatgttgggatatttatacaataataaaattggtagttatatttataatattggtcattcttatataattccgatattgatcactttgctttatttagctatggaagtggatttgttattaggaattgcattgatttggttggctcatatttcgatggatagaacgattggatatggtttaaaatacactgttggttttgataaaacaacaatacaaaaagtgtaaaagtaatttgtcttttagaggtttttagaaacgagttgaaaacgagtttcttcttgtcttgatactataagaaataatttccttttttttaaaatatgaatagatactgatatttcagcgtttctctctactattttgcattttaagagtcgttaaatagttcacaaactataaaaaacaccctaaatgctctaaaaagtaccttaaaattgcaaataagggtattttaaaattcaataactcttgtaataaataaaatatttaaaaaaggagtttttttatgaatgctggtttgtttttgataattgctatttgttgtggtctgttaccaattataatttctgtaaacgaaaaaaataagaagaataaaaagaggtagaacacgcatttatgccgagaaaatttattgaagttgagaagaacccttaactaaacttggagacgaatatcggcatagcgtgagctattaagccgaccattcgacaatttttgggattgttaagggttccgaggctcaacgtcaataaagcgctaacgtcaaaggagcaagctccttatctgttcgctcgacttgcatgtattaggcacgccgccagcgttcatcctgagccaggatcaaactctccataaaaatttatgatgtttgattagctcataatactaaatagtgtttgtaacaattaagttactttattggaattaacgttgacatattgtcattcagttttcaatgttcattttaacaattacatttatttattatatcaaatactaattattcttgtcaagaactttttttatttttcttttcttgaagttaattaatatttcaacaaataatatcttataataaattgtttttataatcaatggtcaaaattacacttttttaacattgttttaaactaatttactttgcgttttcaaacaatatcttttgtttttgacgacttttatataatagcaagattattattgaacgtcaatggattttataatataaaatcgtttaatatttcacatcaaatgtattcattatctttaatgagtatttttttatttaatatttatcttttaaattctttaattacttataaacaaaaaaagcaatgacattaaagtcattgcctaactttattctttgtttttacattcttcacacaatccataaatttccattcgatgatgtgttacgtcaaagtttgtaacgtgttgagctaattgttcaatttcatccaattgaggatagtggaaatctactattttaccgcatcgttcacaaataacatgataatgattatgagtattaaagtcgaacctacttgatgcatctccataagtcaattcttttacaatacctatcttcttaaatactcttaaattattgtaaattgtcgcaacacttatattaggaaaatcaggtgaaagtgcttgataaatttcatccgctgtaggatgtgtatgtgagctaattaaaaatctaacaatagcttgtctttgaggcgtgatacgaacgcctgactttcttaatgctattatagcttgttcaagctcatgttcaattgattctatttctgcactcatcattttcaccatctttctactttataattattattatcttattaataatataactactttcatacttcattgtcaattattccataagttttatattaatagccatcttttaagtctactacgttctcacttatttcttctttattgagaaaacgagttagatttctttcaaatattttcgttgcttcctttttattttctttatcattaccagttatatgtgcagtaattgtcacgttatctaaatcataaagtggatgttctgattctagtggttcattttcgaatacatccaagtaagcatgacgtattaatttttctttaagtatttcaattaaatcgtgttcttctactatagttcctctacctacattaataaataaagtatcttccttcattaattggaaatgatgtttgtttaataaatgatatgtttctttggtttctggtaacgtattaattattatatccgcttctcctaataacttgtctaattcatttatctcatatgtttgattaaatccttctttttgttttcctgttttacttgcacctattattttcaattcgaaaggtgtcaataactttacagtatcttgagcaatagctccagtacctaaaaataaaattgtttcatcctttaaacgtttacctgtcaaagtactatcataaatatgcttttgttgattaataaatgatgtttccatttttttatgatcatttaatataaaagttagtatatattctgaaagttgctttgattgtattcctctagtattggttaaaattattcctttattcttaatgtactctaatggtagattgtttacgcctgttgcataccatgcaatccactttaaattcggacaagactttataaatctttcattaatctccccgtcatatcctatcaatacctcgagttcttttttgtcattatctggaatattatctgctttatcataaaacgaaaatgaaatatcaggatacttttctattaattcattttctatattacctaaacgtttcaagcttacgattttcatttatctcactccagcatttgttttaattcatctatttgtgttttaacttttactttttcaatgatatttgtaatatatcccgcttcatctattacaaacgttgttctcactattcccatattttcttttccaaaacttttcttcaaacgatatattcctactgcattcgataacttaaattcatcatcaactaataaatcaaaattcaaatgatgcttcttaataaagttttcgtgtttttttctagaatccccgctaataccataaactttaactttcatatcattaaagtattgtatattatctctaaagtcacatgcttctgttgtacacgttggtgtgttatctcgtgggtagaaatataatattgttttttctcccataatgttttcattagtaattaattctccattttgattctctaattcaaattttggaaaaagatctcctatttttaacatcgtatcactcatttcttcatattataattattatgttacgatagtaacgaatattattaaataagaaaggttggtactctatgaatttcactgaaagtgaacgtctccaaaagttatcaaatgaatatattttaggtggagttaattctccttcacgctcttataaagctgttggcggaggtgctcccgtagttatgcgtgaaggtcatggcgcttatctttacgatgtcgatggaaataagtacattgattatttacaagcatatggtcccataattactggccatgctcatcctcatattactgaggctatccaagatcaagcggctaaaggggttttatatggtacacctactgaacttgaaattgattttagtaaaaaattacgagcagctattccttcattagaaaaaattcgttttgttaattctggaacagaagcagtaatgactacaattcgagttgctagagcttatactaaaagaaataaaatcattaaatttgcgggttcttatcatggccattctgatttagtattagttgctgcaggaagcggaccttctcaattaggttctccggattcagctggtgtacctgaaagtgtcgctagagaagtcattactgtacctttcaatgacattgaatcttataaagaagccatgtcacattggggagatgaagtagcggctgtattagtagaacctattgtaggtaattttggtatggtaaaacctcaaccaggctttttagaagaagttaacaacatcactcatgagcatggagctttagtgatttacgatgaagtcatcactgctttccgcttccattatggcgctgcacaagatttattaaatgtttatccagatttaacagcatttggtaaaattgttggtggtggattaccaatcggtggctacgggggccgtcaagatatcatggaacatgtcgctccattaggcccagcataccaagcaggaacaatggcaggtaacccactttcaatgagggcaggtattgcattacttgaagttttagagcaagatggtgtatatgaaaaattagatgctttaggtaaacgtttagaagatggtttaaataaacttattgaaaaacatcatattactgcgacaattaatcgtatttatggatctctaacactctattttacagatgaaaaagtaacacattacgaacaagtagaaaattctgatagtgaagcatttgcaaaattctttaaacttatgcttaaccaaggtattaatttagcaccttctaaatttgaagcatggttcttaactacggaacacactgaagaagatattgatcaaacattagaagcggctgactatgccttcagtcaaatgaaataatatttaaaatttaactaacctaagaatgtcatatcgtaaatatacattcttgggtttttatatatgcgtatacttgtatagttttatttgttgagtgtatactaatttaaaaatacattaaactataaacttgttatttaaaggagcgttgtatttgaaattaggcgcacgtatacttaaaactggaattgctatcattctcgccctttttatcgcttcttttttacctgataatgttggtttgaaatctgtagcaggaataagtgctatttttgcaatgcaacctaatatatatcgttcaatgaaaacgatatctgaacaagctacaggtaatttaatcggtgctatattagcagtgattatggtaaccatttttggtaaaaacattgtgattatgggtatcacagtcattttattaatcgccattttatacaaattaaacttggcgcatgtagcaacattagcaggtgtcactgcgttaatcattatggggcaacatacaggatcgttttatcttgtagctacatttagatttattttagtaatgattggagttttaagtgcttcacttgtaaacctagtattcttacctccaaaattcgaaactaaaatttatcataatgcggttaatatttcttccgacatatttatatggtttaaacttgtgattaatgatacttctgaatatcatcagataaaagaagatggtgaacagttagaatctcgcattataaaattagaacaaatctatgattattatcacgaagaacgtacgtttacaagaaaagctgctttccaacaaaatcgtaaaaagatattatttaaagaggtcgttggaacaactcgacaagcttacgaagtattaaaccgtatggctagatatcaaaatgatttgcataatacaaatcatcatttattatttcaaattaaattagagttagattcgttaacagcgtatcacgaacaaattttaaaaagtttatcaaaaaaggcgcgttataatgtagatgattttgataatcagattttaaatcctcaaaagaaaaatcttatggatgcttttcaatatcaattaattcaaaatccatatcaagtagaatattcatattcgaatatcatgcaaattatcgcagctattgaagaatatcgatatcatttagagcatttagatagactaagattaagtttctttacgtatcatcgtaatgacacagatattgaaattcaagatgaagattttgatttataaaaattaaatatcaatactaaaaaagacaaacttaactatcaaagttaagtttgtcttttttagtagtcattatttagttataaatcttgaatgctatatagatgttcgtattcaccttttttagcaatcagttctttatgtgtaccagtttcaacgatttgaccatgctgcataacaataattttatctgcatgtgtgattgttgataatctatgagctacaataagtgtagttctatctttacttaaaacatctaatgcatcttgaataattgcttcactttctaaatcaagtgcgcttgtcgcttcatctaaaattaatataggtggattatttaagaaaatacgcgcaatagataaacgttgcttttgaccaccagataattttacgccacgttctccaacttcagtatcatagccattcggtaaattcatgataaagtcgtgcgcatttgccattttagctgcttcgattatttcttcttcagtagcatcaggacgtcctaataaaatattctctcttactgtatcagaaaataaaatattgtcttgttgaacaagtccaatttgatttctcaagcttcctgttaaataatctttaatattacgactatcgatcaaaatttcaccttcacttacatcatagaaacgtggaataagattaataagcgtagatttacctcccccgctcataccaacgaatgctactgtttcacctttatttatatttaaatttatattttttaaaactaaagattcatcttcattatatttaaagcttacattttttaattcaatatgtccttcttttatttcaataggttgtgcaccttttttatttttaatgtcatagtcttcatctattaattgaaaaatacgatccatagaggcgaaactttgcgttaaagttgtgaatgaagaaactaaacgtcttaatggtccgaataattgttctaaatatcctacaaaagctgctaaggtacctactgtaattgaaccagtaattgctaaatatgaccctactccaataacaatgataggacctaaatctgtgactgtattaatagctgcaaatgaataggcattccatgaagtatgttgaaacgctctacttaaaaagtttttattttttttatcaaagtttttcgcttcattatcttcaattgcaaagctttttattacagacataccttgaacacgttcatgtaaaaatccttgtacttccgctaatgcttgtgaacgtttacgtgttaattttcttaaacgtccaaagaaaaaatatactgtaaagacataaaaaggaaaaataataattgctgcaagtgttaatttaatatctaagaagaacataatagaaagcgcaataataatcgttacacagtctaaccaaatattcattaacccagttaaaataaagtctttcgtttgttctacgtcattaattactctcgatataacttgtcccacttgattatttgcataaaatcgggcacttaaggcttgtaaatggtcatacaattgcttacgaatatcatataaaattttattactcgtccattgtgctaaatattgtcgaaggtattcaattggcgggcgcacaattaaaaatataaatagagtaatacctatcgctatagcaagatgatggaatttttcattggtggttaatgtaccattattgattacaccatcaatcgcatatttaattaataatgggattaacattggaataccaaattttataatcccaataataatcgttgcgaaaatacgatatttatatggtttgacaaattctaaatatcgtcgaatcacactgactcctccttaattttattatcaaaaattaatagaggttgaaccctctattcataaactcatttatttaagaataggcaagtagtttcaacctcttatttattactcaagtactataaactaattaattactatttgcctcaattatgcttagtaattacgaattttttatatctttgtttccatacttttataaagtcaggagcaaaaggaccttttttctgttctatccattgttgtaaaatgtctacatttcttcttagtattacgtctatttcatgaggataattcatttgtttcatatgttgttcatattcatcctcatctaataaatgatatttaccatttggataaactttaatatctaaatcataatcaatatattttaaagcttcttcatcacatacaaaaggcgaagataaattacagtaatagtaaataccatcttctctaaacatgcaaattacattaaaccaatactcagaatgaaagtacacgattgcaggctctctagtaatccatgtacgtccatcactttcagttactaaggtatgatcattcccaccaatgatgacgtgatctgttccttttaaaatcgttgtttcagaccatactctatgaatatttccatcatgtttatagctttggatttttatattttcgccttctttaggtatggattctttgaccatactccacaccaccttttaaagtttttacaattcgaattataccatatttttttaaacttctttaaagagatatagagagatattatatttttctatttaccaacaataaactcataaattttactcattgatactgggaaagaataatcatctcgattttctaaatcaaaccattccataaagtctggtaattgtgctgagtcaatatttatatcttcaatcatactataaacatttaaattccaagttttatgtgtaaactgatgctttaattgaaatattatgttctcagataaagttaatgaatggtttaacttattttctagtttttgaatcccattcggactttcaaacattggaaattgccacataccattaagtagcttttcttgacgtttttcaatcagatattgacctttctgatttctgactaaaaaaacctcctgattaattattttcttagcttgttttttagttttgataggtaaatctaacgtagttccttttcgaaacgcttcacaattttcctgtactggacaaaataggcataacggattcttaggtgtacatattgttgcacctaattccatcattgattgattaaatgtacccgcttcttcttgtacaaaaggttcaagctctttttcaaatgattttctagtagattgtaatttgatatcacgatggtcattattaagtcgagtccatactctaaagacatttccatctacagtagctaaagggcgattaaaagcaatactcattacagctgcttgagtatatggtcctactccttttaattcaccaaaaactttaggggatgatggtacttccgcattataattatggtgtacttctttaattgctgtatgaaaattgcgggcacggctataatatccaagaccttcccaatactttaatacttcatcttcttttgcttcacttaacgcttcaattgtaggaaatcgatgaataaatttattgtaataatcaatgaccgttttaacttgtgtttgttgaagcataacttcacttagccatatataatatggattagtcgtttccctccaaggcatttctcgttgatttttctcaaaccatgtcacaatattatttttaaatgtcgtttcatttaacattaaattatcctttctcttacataaaaaaatgtataagttataatactttctaatatttgataagtatcttaattttgttattctaatttttagattataatatatattaaatcaagatgaaaagagtgaacttttatggatacagccactcatattgctatcggcattggactaactgctttagctacacaagacccagcaatgtcacattctatgacagctactgcaacaactttaattgcgggttctttaatacctgatggcgatacggttttaaaattaaaaaataatgcaacttatatttcacatcatcgtggtattacgcattccataccctttacgattttatggccaatattacttgcttttataatatatgttatctttccacatgtagatgtgactcatatatggatgtgggctcagttagcggtctttttacatgtttttgtagatatctttaattcatatggtacacaagcacttagacctatatcaaataagtggatacaactcggtgtaatcaatacattcgatccaattatttttttaatattatgtataggaatcacgctatggttattaggcgttcatccatatctagtgttctttccaattattggcgttttaattatttattatatcgttagatttaaaatgcaatcaataatcaaatctcaagcgttgaaacacattcatgatgaacatcatcctgtgaaaatttttgttgcacctactatgaaatttatgaaatggcgtgtagcgattcaaactgaaaactatgattatgtaggtagagcttatggtcgtaatataacgtttagcgataaagtaaaacgtcaacaattttcacccgatacacttttatggcaaataaaaagtaatcctgaaataagaacgtttctaaaattctcttctatctatcgttggcaaatacgtaaacttgatgatcaaacaactgagatacgattgatagatttacgttatctaaataaaggacattattcttttgcagcaattgcacatcttactcaagatcaaaaaattgaccattcctatattggatgggtatttacagaagaaaaacttcaaaaaaaattgtactctcattaattcattaactttaactataatttaaacaacccctagatgacttattgacagtcatttaggggttattattataacatcattaaaatatatgttatttatagcgattcacccatatattaaatatattcatatttcttatgagcaacaagtcgagttaaaataaaattgataactccaattaatactaaaaaagcaataaaataaatatgatacacaatattgtacatatttacaaatccaaaaacaattgaagttgataatccgtcaatcaaataatataatggattaatttttaatatttgatcaatcatatttgccttattattaggtataaaaatgataggtactaaaaagaataacatcattattgctatcacataaaatttaaatacttttttacttattaaagtcaataaacctaatgttattgatataaaaacaataaatataatcgacattagtatgaaataaacaaaagatatcaccgatgtttcaaggtttactggcttaaagattgacgtaatcaatgataaaacacagatgattatagcccctatcagtgcattaaggatgggcgtaataataggtgtgagttgaaatgatttagcaataagataatcataattatataatttgaatgatttatatataatataagcaatagttacaaaagtatagaacgcaatcattcgatatatccattgggccttttcaatttcttctgtattaaaaaaatacatcactccaattatgatactaatgataattaattgtattaaaaataaaatcacatcatatttccaagtctcttttacttttgctttagctaaatgtaaaagagatggaaaatgtttaaaatataatattaacttatctatcatgtttacacctacaattcgatataaatccatttactatttttcatatctgcaattaaatatccattatttaattttgaaatccatacattacctttaatattaaatttacgctctaattttgatttatctactataggaaatacaaaaccagttaacttatcctcatcattaaataacattttaataggttgttgtgtaataggcaccacaaatcgttgatctttttcaggaacaagtgtctttttcacttggttatgtggtttatgtaattgagtattaaaataatcaacatacttactgtagtttgacttcatataaggcgctaaagtactaaatttatgcgtttcatataatgcagcaggattaaaataataaattttgttcttacctacttcatatgtatcatcatcgacaattaagcgatattttgaagcactttctccagtaatcgtcacaaaagaatattttgggatttcaatatcttgatgatttgataatgtcacttcatcatgtaaaacaattccataagaaagtttattttcaaaaggatccgtgtcttgattttgaactttcttctgagattcgttgataggaatttcaatttttcctatattattcactactagtgtgccaagtaacactaagacgattaacgttgaaactaaaagcgtccaaaatttaactataaaatccggaactttaacatgtttgtatcgttcgactcttttaaagttataactcatttccggcaatctacttctacttttcttccaatctaaatcaaaattcttaagtgtttcttcatcgtcgatacttaatctatctctttcatgatcattaaataccggtaaaacgtcatttaaatacccttccatacgcacttgtccgtgagaaatccatgtaacatagttactcacttgagatattttagaaatatcatcgtctacaaatataattgacaagtcattagacacatagtcttttgaaagttgttttgccttatttaaaaaagcttcatcaagatattcgagaatatgacttaaaataataatttctgttttacaaactcttgcaacacttaaaatcaattgcgcatactcagagtgactaagtttattcacttgaatcgaagatttatcatctaaatgcgcatatttaataatttgatcgacaatatgtgaagacgtcttgtaattaaataagcattgtgtttcttcaatataacttttaacagacatatttaataaatgtttgttttttatatctccataataaatacttgctgattgtacaactttccctctatcaggtgcaatatcttgggccataattcttccaatcaatgttttggatgaaccaggttctcctatgagtgcaagggcttctccttgataaatgtgtaaagatattttatttaattctatgtcttccgcgccatatccaaacggcagataccactttctattcttttggtttctatagtattgtgtaacatttaataattttaaaacgattgaacttcccatttgtgttacatccttctaaatttttaataatgcaatgggtaaaccctcttcaggattcgtactatttattctataaccccaagcaaaaaccccttttaaacgttcaactttaaagtattgttcactaccatcatttaatttatacattctgccaatgttaattttagaacgatcgactaaataactctcagctacaatgactttactttcataaacatcatattcattcattatgccattcatttcagctttacgcattttttctttacataattgtatttcatgtctcaattcctgttcagacatttcacttaatcttttgtcactcatctaaaataccactttctgctaatttaatttttattttatcataattatatccttttctcataagtgcttctattgttttcatttttaatgtattaccgtcatgtttacgacgttgtttattataaactttttctaaatccttttgtaataagtcatctagcacttcttcgtcttgagcaaagtctaactcattaagtacattttgtgcagtttctattgtatatcctttttggattaagctatgcattactttttgctttactttcacaacaggaccttttttagttttcattatttttttagcaacatgaatgatagattctataggttgctcttcttcatatcgtttaacatatctatctataatattaggttctactccaacttggtatagtttttgtttaaatacttcaggtcctttatctgttgtgttgatcattgtattttttaaactttcagcgtaatcttcatgattaatatattgctctttataacaatattcaatcactttttgtactgtcatttcattaatatcattctttttcaaataatcactaacttctttttcagttcgttttttatatgataaatattgtattgccatattaatccctagacgatagtgttcgtatttttgaattttttccatttctgcagcatctatcatttggttctttttcaaattgaatttaacgagtgtatctatatcaattcccatttcaaatgcttcgtcaagaaagagattaaatcgttctttattatttttttgaacttctattttagtaattttcggcatcattattctcctcatactaattaaaaattgtattttaataatatatttattttataacagaaaatctaacatatatagtatttgatattaaaaaagagcgaaatggaagtttatttattctcattctcactcttagtttatattcaattaaattgttatattactatattaataattattaagttgcgataaggcttcttgatattgactgtcagaaatataattctgttgtcgcattttttctaaattcactttaattcgattcttgaaattatttgatacgttattaatatcatatacacttggggcattaactttacttgctagcattgcactttgtaatacagtaataatcggataactactattattttgatttgtagttgcaccaaaatagtaatttgctgcactttcaatatcatattgattattaccatagtaaatattattcaaataaaaacttaatatctgatttttactatattgctgttcaactttatgcgcgacaaataattcttttagtttacgtgtaaatgaacgttcattattgtaataataattttttacagtttgttgagtaatggtgctcccaccttgtacatcatgttcaccaatcgttgaaaataatgcacgtgttgtcccttttatatcgaatccatgatgtttagaaaaacgttcatcttccatagatataaatgcgcccttaacataattcggcatattgtctgatgatacaaaattactcttattttcaatcgtttgtaaatcatcgacattcgctctagatgataaaaaatacattaatccagtaaacaaagcaaatataataataaatataataagcattcttagaaagagccgtttacttttcttctttttcggtggtgaacccacaggttgataataggtattataatgaggctcattttgatcataagttgttttctcttttggatagttatctctttgtcttcttttcatgggtttgctcctttacttaaaggtcactctataattgagagtttaacagtaagtgttatttttatctatatatacaatcaaaaatcagtctcaaggtgtatcattgattttatatcgctgaaatttccaagttactttaaagaagatagagagaaattatttaaatttggataagaggatttaaaaaacgatattaagttcatcaatatatacatgcttaaaagtaacatttaaaacatattttctccatttctagaaaacaagaaaaacaaatcaatcagatgcttatgaattgacacgacttgtaatgatacattctcagtttcattggagtctatccaaaatacagttacattgtaattcaatcatcgactatcaacacattaaaaatgcctgagacaattacatatgtctcaggctcaaatataactttcaaaaagttattttaaattaatcatttaattttttaacgatttctctattgaaatcatctaaatcatcaggtacacgacttgttacaatattattatcaactactactgattcatcaacaatattggcacctgcatttgataaatctttacgaacatttaatactgcagttaaagtgcgaccatttaaatcatcagtatcaattagaacttgaggtccgtgacaaatagcaaatgttggaacatcatttttagtaaagtattttgcaaatgttccataacgtccttctgcatctccacgtaaattatctggagagaaaccaccaggaattaataatgcatcataattttctggtttagcatcagcaatacttacatttactgtaactttttcgccatgtttcccaacaacttcagcgttcgcagtatctccaataacttcagtttcaaatcctgcttcttctaatgcttctttaggacttgttaattctatatcttcaaattcatcagctaaaataattgctacttttttagtcataaccaaaatcaccttttctttcgttttattatatttaatatatagacaaatttaagatggtttaaacataaatattaaatttagttaaaaactttttcatactccacaattacttagaaactaacttaactttttcttctaattgatctaataatccaatccattcatcaatatcttttacacttacttcatcaggattaacgtggtcaatatcttctaaaaatttagacaatcttgttttaatttgttcaatagtttgtttttcatccatcggaatttaactccttatatataatatttttagcttttattcataactatcctaacaaaatttgacaaaaagagatataattctaataatatttattgtaattttataaagaagaatgttttaaaagtttaggagtttttataatgacaacatcaaaaattaaacaagcaatctcaatttataatgatccgtgggaagcttataatgatattaaacaattcgatcaactcactttgagtaatgtagaatttaccacaacaaatttatgtaatatgagatgtagtcactgtgcagttggttatacattacaaacaaaagatcctgatccattacctatgaatcttatttatcaacgtttagatgaaattcccaatttacgtactatgtcgattacaggtggagaacctatgttttcaaagaaatctataaataatgttgttaaaccattattaaaatatgcgcatcaaagaggcatatatgtgcaaatgaattctaatttaacgttacctcaagatcgatatctagaaattgctgaatatattgatgtcatgcacatttctcataattggggtaccatccaagaatttgcagaggtgggctttggcgcaatgaaaaaacaacctcctttaaaagcaaagttaaaattatatgaacaaatgctagataatgctagtacattatctgaccaagggatgtttgtttcagcagaaacaatgttaaatcaaaataccctaccacatttagaaaacatacataaagaaattgttaatgatatgaagtgtagtcgtcatgaagttcatcctatgtatccagcagattttgcaagtcaacttaatgtattatcattaaaagacatgaagcaagctattcatcatttattagacattcgtgataaaaatacttggatgttatttggtactctcccaatctatccttgcataaacgatgaaaatgaccaagttttacttgaacgattaagaaatgaaaaaaatgttactgttcgaaatgacccagatggccgtagtcgcttaaatgtaaatgtatttagtggggacgttattgtaacagattttggtgatgaaaacggaacaatttctaatattaaaaatgataagctcacagatgtatttgatgcttggttatcaacagatttagcaaaatctttaaattgtcattgtgaagctttccaatgtttaggaccaaatgtattagttaaaaatatgtattatccaaatacaaactttagagaaaatgaaatcgcaatgcacactgaacatagttttcaataaaattaaaagaaactgggacataattcctagcaaaatagccagtaaatgagtttattataaattcatttactggcttctttctttataatattgcgtattgttggctcgctttcttaggggatagcttcagcctgtagtcttcagcttatcctattgtctcaagagtctcgccaaaatactttgtatttatatgtaattttacattgaaatatttttttaaaaaaacaagactctaaggctctttcgtatcatttaatgccaatacatataatttatatcatatgtattgacatttattataaatcctaaatattttctatgtgctgtacttcagataaaaattcaatcgttcttttactgtcttcgcgtcgttcttttcttcgttgaacacgttttggtgccccttcatagaaccacttttctatttttgtttcagggtacaccttaggaatacgtgttggttttccattttcatctagggcaacaaatgttaaaaagctcaatgctgctaaatgcctttccttatttagcacatcttcaataataatttgcacacaaatttccattgaacttgatcctgcataacttaccattgcttcataagacgtaatatcccctgtttttataggccttaaaaaatccaccgagtcggtagaagcagtaaccacttgtgcattcgcatgtttcatagctgtaattgcagctatttcatcaatattagccatcaatgatccaccaaacattgtatggtgatggttagtatcttgaggaaatacttgtcgtgttttaatactttttgattcagacatagattttttattaacttgagaatttgacatactttatttctcctattcctaatttaaatgagtcattgtgcccaattcccattttcgaaaactaattctttagagccgtcttgtaaaataccatatatcgttagatctgaacttccaatcataaaatccacatgaatattagaatcatttaacccacttgctattttttcttcagtagacatttctgtgccacctttaatattaaacccgtaggctgaaccaatagcaagatgacaagatgcattttcatcaaatagagtattataaaagatagtattacgatttgaaattggcgaatcatctggaactagagcaacttctcctaatcgcttagagccttcatctgtgctaattaaatcttttaaaacttcttcacccttttctgctttaacatcgataatttcaccatttttaaatgttaaagtgaatccatcaataatattaccattataacttaatggtaatttattagttacatagccatctacatgatttctatctggtgcagtaaatacttcttccgttgggatattagcaataaatggttgttgatttccatttacatagcttgttgcatcttcccaaatatgtccttttggtagtcctactgttaaatcagtgccttcagacatataatgtaatgccttataatttttttcttgaagtttatttgcatgtacacttagagatttcacatgttgctcccaatttgttattgggtcatttccatccacacgtacaatttcgaatacttcatcgataaattgactgtatgcttcttcttcaggcaaattaggatatacacgttttgcccatgctttagatggaaatgcagctactacccatggaaatgcatttttttggctaccttccatataccctttgaatgcttgtccataattaaactgagacgcttttaatttttctgcatcaatgccatttaataaatctggatcaccggaaataagtgctaaattcgctgctcctctacgagcataatccatacgctcttcaacatcataagctttaacagcatgattttcaaaataatcaacagcttcattttcatattttaagcgttctaaaataggatctgtatataccactcttacatctgaagcgccttcttgataggctacttcgacaattaagcgcgttaaatctatagtttctacagatgttctgataaatacaggctgattttgttgaacgttcatacctacttttactaataattctgcatattgttttaatttgtcttgataatcttgattggccatttaaattctccttactcgtgacgtaaattacctaattcatcagcaattgctgtaatttcacttggtgaaaatgaatctttagacataacaaaatcatgaatatctttaatatcctttgtatctgtatctttaaatttttctggattaattaaagattgatttacaatatttaatttttttcgaatatttttaatcatttgttcattattctgtgccatttgtttcacctctttattatcatattttatcaaagtataaaaatttattaaacttttatagaaattagtaaaattatgactttataaatgttaaaaataactataaaatagtttatatattaaagtttggaggagtacaagatgatagatgtagcttttgtatgtcttggaaatatttgtcgttctacaatggctgaagcaatcatgcgtcaacgattaaaagaacgcggtatttctgatgttattgtacattctaggggtactggacgttggaatttaggtgaacctcctcatcaaggtactcaaaaaattctgaaacaacaccatataccttttgatggtattgttagtgaattatttgaaccggatgatgattttgattatattatcgctatggaccaaagtaatgtggataatattaaatcaattaatcccaatcttaaaggtcaattgttcaaattgctagaatttagtaacatggaagagactgatgtgcctgatccttattacacaaataattttgaaggtgtatatgacatggtacaatcatcttgtgacaatttaatagatttcatcgttaaagatgctaatttgaaagaggggtaactaaaatggaaaacaaatttgttccaggtattattattggtgctatcgttggtggagctgctactttagcagataaatcaacacgcaatgcattagtacaatcattcaaagacattaaagaaggtaatcgttctcgtaaaccttctaaaattacttcaattaaaaatgaagtattgtattggaaagatacgatcgaagaaattcgtcgtaataatccagaattagaaaaatcaattaaagatgctaaagatacatttgtaaatcgtaaaaacaatcgtcttagctaatcaaatataattgacagaaaataaaggcaaaattcctttttacttaggtagttttgcctttattttagaattaatttttaaggagacgtctatgtcaaaaaaaaatcaatcaaactctaagtaccttaactctattaaggaaaaagagacagaaaataaagagaaaataaaggttgatcgtacatacgtagaacctcaggaatttcaatcaaagaagcctaaaaaagataaacaagtttttttcgtttctagattgaataaacctgcaaaatacactaaaaattctaattttttatcttatcttatttatcgtattggtaaagatgatgcttcaggtttagcggctcaaatgacgtatcactttgtattagctttattcccaatgttaatctttttattaactttattaccattattccaaattgatcctcagcaaattaaagacttagttagtcaaaatgctcctgccgagactgctgacgttgttactaaaatttttaaagatattacaagtaactctagtggtagcttattatcagttggtttgattttagctatttggtcagcatcaaatggtatgacagcaattatgaattcattcaatgttgcttatgacgttgaagatgctcgtaatcctattgttcttaaattattaagcattttgtttacaattgttatggctattgtattagctatagctctaacattacctacatttggtaattttattaaagatcatctatttggtccgttaggtttagatcaacaagtcgcttggatatttgatttagtgcgtatattgttaccacttattgttattattattttattcttaacattatattcagtagcacctaacgttaaaactaagtttaaatctgtatatcctggcgcaatctttacttctattgtatggttattaggatcatttgcatttggttggtatttatctaactttggcaactattctaaaacatatggtagtcttgctggaatcatcattttattactatggatttatattacatgttttattattattattggtgctgaaattaatgcagttatccaccaaagacatgttattaaaggttctacacctgaagaagctgccttaaaacatgatgataataatgaaaatcactacaatgaaaatacaaaatatgaatacgattctacagcatcatctaaatatgaaaaaaattatgatgtggatcctacaccaaatgataaacatagtgaacaagaatcttttgttgataaaattaaagataaatttgataaagataataataaatagctatagaaaagaaaatatctaacgaaaaaactccttatgagatagtcatttttagacctctttataaggagcttttttattattgaattaaattatgttggaatgcataaataaccgcttgtgttctatcttgtacctctagtttacttaaaatattactcacatgtgtttttactgttttaattgtaatatgtgaagcactggcaatttcttgattagaatagcctttagcaattaataacaatatttccatttcacgttcagtgagcatttcatataattctgctttcttcttcattctatttctcatttttactaaaacttctggctcaaatacagattctccacgatatgtttttctaactgcttctgcaatatcacttgcacttgtcgtttttaatatataactatcaacccctgcatcaagtgccctatatacttctttatcttctataaaacttgttaacatgactactttgatgtgaggcaaatctttttttatttgtgtcgtcgcttctacaccgtccatatcattcattaacaaatccattaaaattaaatcaggatttaacgtatgtgctttttcgattgcctcttttcctgatgatccttcccctactacttcaatatcagattgagtagataaataacttgaaataccaattctaaccatttcatgatcatctacaaataatactttaatcgtcatattaaccctcctctttcgttaaaggtgcttttacctctattctagttcctgaatctggtaaagatacgatatgaaacgttgcacctatttctaatgcacgttctctcatatttttcaatccataactttgttctactttttcatctacgttaaaacctttaccattatcctgaattcttaataataaataatcttgatgattaaataattctactgtcactttagttccattagaatgtcttaatgtatttgaaattgcctcttgtgtaattcgaaatagatgatcttcaattcctttaggaactttaaaatcttgtatatcataaatgactttcataggtactttcttttgtaaatcaatgactaaatctttaataccttcccctaatgatttatctttgagtcctaaaggtcgcaaatgtagtaatagcgctcgcatctctaattgagattcttgtatcattttctcaagtactggaatttgttgattaagaggtggtgctagttctgtttcttttatcgctgatagcatcatacttgctgcgaaaagttgttgacttactgaatcgtgtagttcccttgctaaacgctgacgctcatcttctatgatttttttaactttaatgtcattcatattatagttttcatttgttaaattttgagttttaattcttaatctctgtaattcttgatttaaaggcactaacatttgataaatatcaattgtctcattatatagttctatatttttatcattaatccctaccgtttcgccttcaatggcatgttcaatttgattctttatccaatcattttgctgatttattttataagctaatacagagccaacgataatacaaagtaaaataatcactaaattaagaaatagaaacacaggtataccaaatatttgagtatagaacattccttgaaaatatataatatttacaaaaactttatctataaataaaaacgcagttagcatgctatacactaaaataagcatggatcctattgctcttaaatagtgattcatcgataaatcacctcaacatcaccaataaatgttgatacatatatatttacactataattttcttctttaggtttttcttctacttggacatgattattttctactttatatgcttctccatttatataagctgtaccataaaatgctgccatgtgaagattaatattataattaactggaacaatcagttgtactttacctaaaatatgtctaactacaatcgtattattttctttgatatttgctgcttttgtcatatcaatatgaatatctccaaccccatgttgaatttgcacatcttcccatttatatacatatactggagtgcgttgttcacctagccaacgttgtttaataaattgaggagaggtcacttcttcttccgacgccgcaatcttcaaaggtttaaatttaaaaactaagtatctaataatgattattactaaaaatataaataaaataataatcgtatatttgttggataacaaggtaaacgctatgagtagtgctcctatccaaaacgctaataaccctcttactttatgaaagtaaaggtatcctacataaattaatatacaccctaataataaaataaataaatatccaattttttcaaaaaagatgtaataaaagttagcgataatcattagcgctgtaaaaataattaataattcagtagatatatatttacgtgtcaatgtgtccctcctgattttaattaagctacataactcatttgttcaatcattgcatattgttcttctgtagcaattcgttctttcgtacaacgatgaatattagcttcaatttttgcatagtatgcttcaaatttatctaaacgttgttttaataaatctatttcataattatggacttcttgcgcattttttatattatacatatttatcatatcaatatacttattttctagtgtagcagataaactgtcaattaatgtattcatttttgcttttttattttttaaatattttatatatcgctccatattttgaagcttatcatctaataatgagcgataatcattgatattattttttataattatttttaaaaagtgttgtaaatataaatctaaataattcatagaaccacctcgttgttgattaaactttattataaatgagtttaatcttacttaatatagtcctaggaaccattttcttctcatacttaagtacgattaattttaatttattgaagaatatgctataaataaatagcgctaaattaaatttatagttaaatcaattcattattcatcaaaattagcatataataatgtatatttagttagaaagtaggtcatatgagttgaatacaattaaaaagagagatttaagttggcttccatatattgtaatagttattttacttcacattatcggctttagttttttatttattgctaatactaatcatttattatttggtatgggaattttagcatatactcttggattgcgtcatgctttcgatgcagatcatattgctgctattgataatacagtccgcaagttacttcaacaaaaacgaaatcctgttggagttgggttttacttctctataggtcactcaactgttgtgtttttaatgtctgttcttctaggaatttcagtaaaatgggctaaagatgaacttccatattttcaaaatataggcggtattatagggacattagtgtctggattctttttacttcttattggaatattaaatttatttattctaatttcattaataaagctttttgctcgattacgtaatgaacatatacgagaagaagaattagatgcactattggaatcacgtggttttattactcgctttattgctccttattttaaattgattagccgtagttggcatgtcttacctttaggtttcttatttggtttaggttttgatactgcaagtgaaatcgctcttcttgcactttcatcaggagcttctcaacaatccatttcgtttttaggcattttatctctgcctattttatttgcagcaggaatgagcttattagatacactcgatggcattattatgaaatctgcctataattgggctttctttaatcctatacgcaaaatttactacaatattacaattacagccatttcagtaattgcggcattaattattggattaattgaattacttcaaattatggaagataaacttcaccttaaaggtacgttttggaatataattcagtcgattcaatttgattatttaggctacatcttggtagctttattcttaattacatggcttatttctacacttatttggaaatttggcaaagtagaacaacgttggtcataaaaagaagttggatagaattcgttttgaattctatccaactcttttttcttaatcaatttttgttgttagaatcggaccgtctttagtaacaatgacagtatgttcaatttgagctacaaaacttttatctttagtttcaaatgcccaatcgtttttaccttcagtaacaaaagttgctttagacgaaataaaaggttctactgcaatgactacgccttcttttaaaagcgtcttatctttaggatcataataattcataacatgacttggcgcttcatgtaaagattgtcctacaccatgacctgttaaattcttaataacagttaaatcatttttacgtgctgtagcgtggactgccttaccaatgttacttaattttgtacctggttttactttagccattgctgcatcaaatgcttcaagtgctacatcacatactttttgttttaaaggattatccgcttctcctactacaaaagaaatgccagtatctgcataatatccattttttaatgctgaaacatctatattaactaaatccccttcacgaataacacgtttgccaggtatgccatgagctacttcttcattaacactaatacaagtttgacctgggaatttttcatcatgaataggtgctgagattgcaccatgttcttcaaataattctttagcgatattatctaattcttttgtagtaataccaggtttagttgcttcttgcattgtatctcgcactttcgcacatatatatcctatttcttttaacgcttgtaattcttcatctgtttttacaatcatattatcccgttcctttttaaaaaatattccaccttattataccaaaaattttttgatatactaaataagaaatgtactatctactgacttgatgtctcactacatcaagcttgatattaaacttattctaacattataatcatcacgttcattctttgagaggatttaacaatatgaatcaatggtataaacatattataggcgctagaacaataaaaacggggctagctacttttctaacaactttattttgtttactattaaacttaactcctatatttgctattttaacagcaattgtttcgattgaaccaactgctaaagcttctttacgaaaaggttatcgtcgacttcctgctactgtcataggtgcattatttgcagttatttttacgtatatcttcggcgatcaatctccatttacttacacctttagtgctattttcactattttagcgtgtacgaaattaaatctccaagttggtacaactgttgcagtattaacttcagttgctatgatacctggtattcatgaagcctatctttttaattttttctcaagactcttaacagctttaattggcctagtaactgctggattagtaaattttttcgtattaccacctaaatattatcatcaaatcgaagagaacttaattcattcagaaaataaattgtatgaactattcgcttctagatgtcatgaattattattaggaaaatttgattcagataatagtaatatttcattagcaaccttatctgatatggataaaaaaacagatactttaatgaattatcaacgagatgaattacgctatcataaaaataacgaagataaatggaaacaattaaaaaacatgtcaaatagagcatatattgatagacttcttgctacacatttatcaaatattatttatttaccaaaaaacgtaaatatttgttttactactgaggaaaaaatggcaattataaaaattagtaatagtatcaacaatattcctttagatggagtttttaaaagagaatctaagtctgtatctactttaaaatcatcagtcaaaatattagaagaattcgataagaatcaaattaagagtcatgttatttatgaaattttacttatctataatttactagataatcgatttgttaaagcataaaaaagttggatgaattgaaataattcaattcatccaacgtttttttatttttctgaacgttcaataataacatatttcgcagcttcttcttcagtattatctaactgtttaggtgtaaatggaatccctttacgttcacatgccttctctaataaataatcagtaagttcatgatttttcggtaatatagggccatgcaggtaagttcctaataagtttttataatgaataccttcttttttatcatcatcattatttccataccctgttactacatgccccaatgtatcaaaattatgatatgtacgaccaccgtgattttcaaaacctactattgttccaaatgtatcacttttaattacgatatcccctgttaaacgatctgtttttgattttgtataaaagtccaaaattccaagtccttctaactctgtaccatcaggggtaatatatttagtacctaaaaattgatatccaccacaaatggttaaacctggcattccatcttctattgcatcttttaatattgttttaattttacttaactctttagtagcgatactttgttctctatcactacccccaccaataaagaaaatatcgcaattttctaatgtaactccctcagtttcattaatttcgataacttttaaattaatattgcgtttttttgctctctgttttaaagcaataatatttcctatatcactatataaatttaatttgtccgacataaaatgaaaaactgttaattcgtacatatctaacgtcctcctgcaaatgagcgattaagttgttctaacataggtgaaagtgacgtataatttggaatcgctactgtaaagcctgcataattcatagttaaagctgtagctttataaatatctttctctaaaataattggaacatctacttcagctaatttcagtctaagttgtaattcttctgctcttgtacccgttacaataattttttctatattttgattacgtaacttttcaaaatctgcatcgtaaatccaagatgtatctctgccatcagctgcattatcattcagactgataacatatacttttttttctttaagttgatctccgactgatagactcacattcatgccagcaggatttttagctaaattaatcattgcttctttttgaccacgtttaaagtattgcattcggccattatttgaagtgtatgtgttaaatcctttacgaattgcatcattatttaagcctaattcttttaatactgaatatgcagcaagtgcattaaaagcattaaaatcaccagcaattttcatttcaaagtgtgcatcgttcacatccatatcaataaatggctgtacctcaaattgtgaaacctcatatttaggtgtttcacgcttaaatccacattcacaatgataatgtcctaattgattataatgggtataatcataagttaataatctaccacaattcggacaatatttactttcattcatagtactttgttcaaattcatgtgcatgagctttcattccgtaatatacaattgtatcactcgctattttcaaacgacttacaaatggatcatcggcatttaaaattaatttaatccctttattactaattgattttgcaatattattaaccataatatcaatttcaccaaatcgatccatttggtcgcgaaagaaattagtaaataccatcattgaaggtgtaacttcttttaatacttttggaattgaaccctcatcaatttcaataaccgctactttaataccttttacatttttcatgatgaatgccgaggtaattccagcagccatgttagcaccttcattattatgtataatttcaatattatttgcttttaaagtgtgcccaatcaaattggaagttgttgttttcccatttgttccactgataaaaacaatatcatcaacttgtgaagctaactttcgtaaaatattttgatctactttgcgagcaatttgacctggtaaatcagttcctttttttcctgctgcgatacttatcttgcgtgctaatttagccaagtgtgttgctgtccattgtctcatgtctttcctcctcgcataattcactcgagtaattataccatgtatctaaaataacaaaaaatattctcaattaaaagtaactaaatacacttctaattataactttttcactttaaattccgtatctatttttttactttgttatttatagattatgaaaaaaagcaattatttatatttaaaccgtactttctgttaaactgtgaataattcaatttaagtatttagaaaggaatatagaatggttaaaaattcatttatagctttggattttgaaactgcaaataaaaaaagaacaagtatttgttctgttggcatggtaaaagtagtagataacgaaatagtcgaaacgttttacacgcttgttaatcctcatgactatttttcagaaacacatattcatgttcatggtattcatcctaaggacgttaaagatgcgccagattttaaagaagtctttccatatatgttgcaatttataaatcaattacccgtagtggcacataatgctgcttttgatatgggtgtattacatcaaagcttaaaacatttaaacatagctgttccctcacttacctatttctgctcgtatcaacttgctagacgtacgatcaaagcttatcgatatggattaaaacatctaatgaaccattacaacttaaattttcatggtcatcatgatgccctaaatgacgcaaaagcttgcgcaatgattacttatagattattaaaacactatgatagcttacaaagtgtgcttcaatttcatggtaaaaatttaaaagatagaaataggtaatttaaaacgtcttatctatctctatctttaaatgaaatcataaatggtcatattttgatatgttgattgctctagatgacctactgtaacaccaattaatctgataggtacatcagggtcttttaattcatgatataaatcataagctatattataaatatcgatgtctttacttaccgcttctctcaaacttctttgtttagaatatgtttcaaagcgatgcgttttaattttgacagtaactgttgtgccagacttttgcaattgagttaatcgttcagatgttttaccagaaagttcccatattttttgtagaatcgcttcatcatcattaatatctgttgaaaaagtacgttctgttcctactgacttacgaatcctacttgcctttacttcactatcatcaattcctcttactttttgataaagtcctcgtcctttttttccaaaccagcgaatcaattcaaattccgatttgctatataaatctttaccagtataaatatcatgttcatgcatgatttttttagaagcttttccaacgcctggaaaatcgcctatatctaagttcattaatatgtcatgcacattctcataatgaataaccatcattccattaggcttattcattccactagctaatttagctaaatacttattataagaaacaccagcagaagacgttaaacctgttttgttaaagatatctttacgtatgtttgaagcaatttttgatgctgatctatgtggtttaactaaatgagtaatatctaaatatgcttcatctagtgctaaaggttctacaatctcagtatactgtttaaaaatttccattatcttgcttgaaacttcacgatatacatcaaatcttgctctaacatagtacccatttggacatagtttatgtgcttgcgacataggcattgctgaatgaacaccatatttacgtgcttcatatgaagcagttgaaacgacgcctcgatgacttgcttttccacctacaatgacaggttttccttgtaatttaggattatctctcatttctacttgagcgtagaaacaatccatatcaatatgaacgattctcctttctgtcattgtctcactcctttttaaataaaataagccccaatactattatactgcaccctaaaagaaaacactttataaatgcatttataataatattaagacttatacagatgtttaatcatagtcattatttatagatataggcaaataatgatacataaagataccttcatcagtagaacgaatatatttaaatttgttaataattgttatagttgctagataaatatcaatcaaacaatacccgatgtgtatgcttgatataaatataatagaagagtaagcaaagtgataaaatgaaagcattaaccctattgtaatgattactaatggcgcaagcatgactgcacaaaattgccatttattaaagtatttagatgacaaataaatgagcaaaattccatttttatatttaaattgtggtttctgtcctttagaaaagataaaaaataaatacttatgtattaattcgtgaataattaatactccaataaaaccaagtattccataaatgacatttgtcaaaaaacgttgttcaataatatcaacataattaattgcccacttatatgtaactaaaattgcaaataacatcataacaacttgaatggtaagtaattttgatattttgattcgattgtgtgataaatcaattttgtgcatctgtcaacctccacccatttcgctaaaactcttccatagtatacatgtagaagtgttagaatgaaagcgattatacataacttaaaccctttgtaatcttattttaataaacttctcctcatttactttaatttaattacaatgtttttctttcgaataaggccacagtttcaatatgtgttgtatgtggaaacatatcgactggtgttatttcttttaaataatatagattagctaaaagctgagcatctctttgttgtgttgaaggattacatgaaatatagataatacgtttaggggctaactctaataatgtttctataaagacttgatcgcatccttttcgtggaggatcgaccatgataacatcaggttctattcctttttgtttccattcaattatcacttcttctgctttaccacattcgaacgttgtattatcaaaatgattaattaaagcattttgtttggcatcttgaatggctgatggcacaatttcgacaccatatacatgtttagccactggtgccatgtaaagcccaatcgttcctataccacaatatgtatctaaaacaatttcatttccacttaattgagcatagtcgatagctttctgatataatttttctgtttgaacagaattaatttgataaaacgattgatcactaatttcaaaaatagtttcacttaactgatctgtaattttatcttttccatataaagtcatcgattgcttacccattatgacatttgaatgtgaattattaatattttgtttaatacttgttatgttaggatataactctgttagtctatgtactagggtttcagcttctttaaatttagaaccatttgttacaaatataatcataacttcatttgtataacgacttgttcgaatgactacatgacgtaataacccttttttatttttttcattataaatgcttacattcaattcatttaaccactgttttatatcattcattagttcttgttgtttttcatcttgaattaaacaactatccatatcaatgatgtcatgacttctttgacggtaatatcccattatcgttttattatttttatctttacctacaggaagctgggatttatttctatatcgccatggataatccataccaatagtatcatgaatcactgtttcctctaatttcgcctttttatgaaataaattcacaacttgttgttttttcatttttagctgagattcataagacatgtgttgtaactggcatcctccacatttctcataatatatacaaggaggtattactctttgctcactttgttttagtacttttattagtttaccaatagcaaagtttttctttactttaattaccttaaattctacttcttcatcaattaacacattaggaacaaaaataggataacgatctaatttaatcacaccatgtccttcatgtgttaaatcgatcacttttccttttattacatcatttttattaatcatcacaattattttttcactccatatgaaaaagaggtacgtataacttcttaccttttcaaacccgaaattatagataacctctttttaacttcttatttcattttccctaatccgtttatttcttaaatactttaattattttctgagagctcactattataaatatctttaggcgtacaaacttcaatatgctgttttaaatttaaaaagtttgcaggtaatttaccaccatattctccatctacatttaattgcatatctgtaaatgatgaaatattaattgattttgcttttttatatattactttaggatgtttggtatgttcacctctagaagctaatgtcatgatatggcctaattcagctaagtttgctttctcaacgataattaaagtataatacccatcgtctaacttagcatcaggtacgagtttttcaaagcctgccattgaattggtaagccctagtaagaataacagtgcttccccttggaatacttcattatcatattcaattctcaaatcgactgccttcatttgcggcaacatttcgaacccttttatataataagcaaaaggtccaacaatagattttaagcgactaggtgtttcataggatacttgcgtgagcttacctccagcagctaaatttataaaatatcggttattcatttttccgatatctacttttgtcatatgacctttaataataacatctactgcacccataatatcatttggtaaatgtaaagctcgtccaaaatcattcactgtacccataggtataatacctaatttaggtctattgggttgttcagcaattccatttacaacttcatttaaagtgccatcaccaccagcggctataataatatcatagttttgttcaagtgcacgttccgcttcaagtgtagcatctccttctcgttcagttgcataagcacttgtttcataacctgcacgttctaattttattaaaacatctggtaaagtacgtttaaatagctcctttccagaagttggattataaatgattcttgctcgttttctcataagtgatccctctacttttttttacataacactatattaaatgatttatgaatgagttaaaagtatttataccaattcttttaaatttttgtgggtatcattttgttgtacaattgttgtaagaaactaaccgacgtaaagcatatctcattcttttgacactaggaacaaactaaatactgcgcttatctatcctattgaaatccaatagccttttctctagaaatatgaataaaaaaactgttcacaatcttaaacgctttgtgaacagtttagcttaaacttatatttaatacctcatatgagatgagctattatcttttatccaattcttgttttaataattgattgactttttgaggattagcttgaccttttgaagctttcataatttgacccactaagaagcccatagctttccctttaccatttttataatcttcaacagattgtggattattatctaaagcttcattaacaaattttaataatgtagcttcatctgaaatttgaactaaacctttatcttccataatttgtttagcttctccaccattttcagctaattctgggaatacttttttggcaattttactactcattgttccatcttcgataagcttaatcattccagcaagattttcaggagttaattttgtatcttctaaatctacttgatttttattaagatattcattaacgccacccatcaaccagttagatgttagtttaacatctgcaccatgttcaatcgcaccttcaaagaaatcagacatttctttagtaagtgttaatacatgcgcatcatattcaggtaagcctaattcattaacatatttagctttacgttcgtcaggcaattctggaatggtttgtcgcacacgttctttccactcatcatcgacatatagaggtacaatatctggttctgggaagtaacgataatcatcagaaccttctttaacacgcattaaaatagttttacccgttgattcatcaaaacgacgtgtttcttgaccaatcgtaccaccatttaataattcttcttcttgacgtttttcttcatattctaaaccttttctcacatagttaaatgagtttagatttttcaattcagttttagtaccgaattctttttgaccgtaaggacgtaatgaaatattagcgtcacaacgtagtgaaccttcttccattttacaatcagagacaccagtatattggataattgaacgtaatttttctaaataagcatatgcctctttaggagaacgaatatctggttcagatacaatctctattaatggtgtaccttgacggtttaagtctactaaagagtaaccatctttatgagttgatttacctgcgtcttcttccatatgaagacgagtaataccaatacgtttcgtttcaccatcaacttcaatatcaatatatccattttcaccgattggttgatcaaattgagaaatttgatatgctttcggattatctggataaaaatagtttttgcgatcaaatttagaatttgtagcaatatccatatttagagccattgacgcacgcatcgcccaatctactgctcttctatttacaacaggtaaaacacccggataagctaaatcaataacattagtgtttgagttaggttcagccccaaaatgtgctggtgatggagagaacatttttgagtctgtttttaattcaacgtgaacttcaagtccgataactgtttcaaaatgcattatttccactccttataatttttcgtatgcgtcgtgtaagttaaattgtgtttcatattgatatgccacacgatataatgttttctcatcaaatggtttaccaataaattgtaaaccgattggacgtccgtttgattggccacatggcacagaaataccaggtaaaccagctaagttaacaggcgtagttaataagtcatttgcatacattgttaaaggatcatcaatttcttcgcctaaattaaacgccgttgttggagctgtaggccctacaacaacatcataattttcgaatactttatcgaagtcatttttaattaatgttctaactttttgagatttattataaaatgcatcataataaccagaacttaatgcgaatgtacctaagaagatacgacgtttaacttcgtctccaaagccttcagaacgagacattttgtataattcttctaatgtttgtgcttcttttgaatggtagccataacgaataccatcgaaacgtgctaaatttgcagatgcttcagacgatgcgattacataataagaaggaataccatatttagtatttggtaatgacacttcatcaacttctgcaccaagtgattttaatgtttctactgcttgttttacagaagtttttacttcctcgttaacaccttctcctaagtattctttaggaagtgcaattttaagacctttgatgtctttaccaatttcagaagtaaaatcaacatcttcaaccggtgcacttgtagagtcatttttgtctgcgcctgcaattgcttctaataccatcgcattatctttaacattacgagtaattggtccaatttgatctaatgaagatgcaaatgcaactaaaccaaaacgtgatacacggccatatgtaggtttcatacctactacaccacaatatgcagctggttgtctgattgatccaccagtatcagaacctaaactaaatggtactaatcctgctgctactgctgcagctgaacctccagaagatccccctggaactgcttgatgatcaaatggatttacagtttttttgaaataagatgtttctgtagaaccacccattgcaaattcatccatatttaatttaccaattaacactgcgttttcttgatgtaatttattcatcactgttgattcataaatcggtacaaaaccttctaacattttacttgcacaagttgtttcgacatctttagtaataatattatctttaattcccattgggattccaaataatttaccttcaaattgatctttagcttgtaactcatctaattctttagcttttttaattgcattttctttatctaaagctaaaaatgatttaattgttggatctgtttcttcaatagcatcataaatatctttaactacttcagaaggtttaatttctttattcttaatcatttctgaaagtgtttcaacagattcatagcgaatactcatcttaagcgtcctcctcattcatgatagctggtactttaaattgaccgtcttctgtttctttcgcattttttaatgcaagttcttgaggaataccctcgattgctttatcatcacgtaacacattttgtaaatctaagacatgatatgttggttccacaccttcagtatctgctgaatcgttttgttttgcaaaatctaagatactttcaagtgtattagccatttcttcagtttcttcaggagaaatttgaagtcttgctaaatgtgctatatgttcaacttcttcgcgtgtaactttagtcattattaaaaaagcctccttattactcattcatcataaaattgtatcaaattttcagttaaaaatctaaatatttattatgatactcggtgtattaactattcttagcaaagttaagaattaaaacaactttcttatgtaactcatttacatagttacctataaatatacattaatttctattaataatttattaatattaacgttatataataaaatgaattattttttatctatactctaattcttgttaacgcttataattacattaaaataaactgttatttatagataaaattttacttctctaatctataaatatgtataatattacacgtaactaatttaaaaatcgtcacttctttttttcagtacaatgttgttgaaaaacataaatttaaaagttttaaagggggtaattacaatgtttgtattaggtgtaaatttaggcactcatgctaacacaaactggcagacttatattatgattgcaatctattttattattctgctagtgattggttactatggttataaacaggcaactggcaatttaagtgagtatatgttaggtgggagaaatataggcccatatattactgctttatcagccggtgcttcagatatgagtggttggatgattatgggacttccagggtcagtttatagcacaggtttatcggcaatatggattacaattggtttaactattggtgcctatgttaactatctcgttgttgcaccaaggcttagagtatatacagaagttgctggagatgcaattacgctccctaattttttcaaaaatcgtcttaatgataaacataatatcattaaaattatttctggtcttattattgttgtttttttcactttatatacgcactctggttttgtttctggaggtaaattattcgaaagcgcatttggattaaattatcatttgggactgatttcagtcgcaattatcgtcattttatatacttttttcggaggatatttagctgtttctattactgactttttccaaggggttatcatgcttatcgcaatggtaatggtaccaatagttgctttgatgcaacttagtggatgggatacattccatcaagtagctgaaatgaaaccaactaatatggatttatttagaggtactacttttttaggtatgatttcattatttgcatggggattaggttattttggtcagcctcatattattgtacgatttatgtctattaaatctcacaaacttttacctaaagcacgacgcttaggaataagttggatgactgtaggtttacttggaactgtgggtgtagggttaacaggaattgcttttatttcgaaaaatcatattaaaatggacgatccagaaacattatttattatcatgagccaagttcttttccatcctttagtaggtggattcttacttgctgccattctagctgctattatgagtacaatttcttcacaattattagtgacttcaagctcacttacagaagatttctataagctcattcgcggtgaagaacatgctcaatcacatcaaaaagaatttgtactggtaggcagattgtctgtgttagctgtagccattgtagctcttgctattgcatggtctcctaatgacaccatattaaacctagtcggaaatgcttgggcaggttttggtgcagcatttagcccacttgttcttttttctttatattggaaaaaactaacacgtgagggtgcgataagtggtatgattgctggagctctcgtagtcattatttggattgtctgggttaaaccacttgctaatattaatgaactatttggcatgtatgaaattatacctggttttattagtagtgtaatcgttacataccttgttagcatcttcacctataaatcagactattctattgaacaacagttaaatcaagttaaaacaattgttcgcgaaaaataaattaatttattgaaaattaaaaagaggctgcgacacgacgtgtcacaacctctttttaattaattactataaatatggacttgtgggtctttgtcatcttttgttttactaataagtgctcttgaattgttaccatcttttatacgaatttcgtaactatctatattatcaaaatatttcttagcttgttctgttacatattgtgtaattcctattgtttcagcttgaccatagtaatcgattggcaaatcaatcactagtctattaggtttcttatctacaaatttcacttttccaattgcttgagtaaaattagagaaataagattgaagatcgtcattaaattgtttaaagttattatttagatttttgtcatatttttctgcttctgttgaaggtaaaagtgctgaaatctcatcaattttattccatttattaattttagtttgtttatcatcaacaatcgtattagcaataaagtgtcctggcgtaattgcatcttgactcgattgaacatatattgcaaagtgaattggaatatttttcaaatctttatttgctctaaggcgtgtaagtaactcttgagccattgctttaccttgtttttcaatttctttattatctagcgatttgctatatgtttctccatctttttctttttgataataatagacactattcatagcaagaccaattgttatgcctttaattttttttccttttgtatcatttgtatcataaaaatcttgttctaagatattagataaataagcaggagagctttctgctattttttctggtttagtttctccatcatgtgatggattaagacctaaattttcagtagctttttttgattctttttcactttcactcatgtgatcaatttcgtctttagaatacttgggatttaaatatgcgttaactgtatttttgtctaaatactgcccatcttgatataaaaaattatcagttggaaatacagacttacttagatgtaataaaccattttcgaaatcttcaccattatagctattagccatattatcttgtaatactccacgagcttggctttctttaaatggtaagattgtacgataattatctccttgaacttcttgatcagtggcaactgtttttacattatttgaattttgttcttgttgcttattatttgactgactatttttatcattcccattgccacacgctgtcaatatcataagcgacgttataactaataataataaccgcttcattacgttctcctctattctgctatttcattttgtttttcaataaattgtgattcggaccatatttctgtaccaaattgttcagctttagacaattttgagccagcatcttcaccagctattactaaatctgtacttttagttacactacttgttactttagcaccttgcatttctaaccatgttgttgcttctttacgtgtcatttgttgtaattttccagtaagaacaatagtcttattttgaaattccggatgtccttcaatttcagaggatttaacacctttatatgtcatgttgacatttttatcttttaatttttcaataagtgctttaatatcctcattatctagatacgttactacagattgtgctaatttatctccaatatcatggatcgctaccaattcttcttctgttactttaagtaaacgatccatggtttcaaatttctctgctaaaatttgacttgctttggcgccaagatgtcgtatacctaaaccaaataataaatgttctaaagaattttgttttgcatgttcgatagcgcttaataagttttctactttttttgtgcccattcgttctaaaggcaataaatcttctttagttaaataaaaaatgtcacttacatctttaataagctgatgatgatacagttgctgaatgattttatttcctagtccgtctatattcatcgcttgtcgagaaacaaaatgaatcaatccttccacaagttgcgcttggcattttggattgatacatctaagcgcaacctctccttcaatacgcactaattcatgaccacaacttggacaatgcgttggcatatggtatggttttgcatcatttggacgacggtcaataatacttcttacgacttcaggaataatatctccagcctttttcactataacgctatcaccgattctaatatcacgttctttaattaaatcttcattatgaagtgatgctcttgaaactgtagtacccgcaacacgaataggttctaaaatggctgtcggtgtaacgacgccagtacgtcctatacttaattcaatatctttaagttctgtgacaacctcttcagctggaaacttataagcgattgcccaacgtggagatttttgagtaaatcccatttcgtcttgttgatcaagatcattcactttaataacaattccatcaatatcataagatagctgttcacgttgtttagtccactttttaatatattctagtacaccctctatatcttctacgcgtgcacgttcatgattagttttaaaccctaaacgatctaattcatctaatgcatcactttgagtagtagcgctaaaatctgtaaaatcatttacactatataaaaagacacttagtttacgtttagcagctaatttaggatctaattgtcttaaagaacctgctgctgcattacgtggattagcaaatggttgttcttcatttttttctctctcatcattcaatctcataaaggaacgacgtggcatatatgcttctccacgaacttcaacatttaaaggttctttaattttaagaggaatcgcatgaatagtacgtagattttctgtaatatcttctcctgtggtcccatctcctcgcgttaatccctgcacaaatcgtccatcttcatattttaaagaaactgctaaaccatcaatttttagctcacacatatattccacgttaccaatatgttctcgaatacgttcatcaaaacgtcttagttcttcctcattaaaagcattacctaaactaagcataggtgtttcgtgatttactttttcaaatgatgattgagcttctccaccaaccctaactgttggagaatcgtcagtttttagttcaggatgtgcattttcaatatcaattaattcacgtaataatttatcatattcactatcaggtacagaaggattatctttcacataatattcgtaactatattgatttaataaatcatgcagttcattgacacgattttgaatgttatccatttactaatcctcctttttttcgataggcgcaaattgagctaataaacgcttaggaccttcagatttaaatataatatctaattcaacagagccatttttttcacttacattgctcaccataccttcgccccatgatttatgtgtcactttatctcctaccttccaatctgaagcagatacttgttttttagtagaagtcgtacgtttactaaaaccacgttttgacggtgtagttgacttagaagtgattgtttgtcgttttgattttgctggtgtttctaataattcttcagggatttcttttaagaagcgtgatggtagatttgcttgtgaacgtccaaataacatacgagaagtcgcatgtgtaatatataacacttcttctgcacgtgtaatggctacataacaaattcgtctttcttcttccatctcatggtcatcatcacttttaattgctctaatatgagggaaaagtgattcttccatacccattaagaatacaattgggaactctaatccttttgcagaatgcatggtcattaacgttacaccactatcaatttgtgcttcgtcaatatctgcgacaagtgataaatcagttaaaaagttaatcaatgattgttcttctaaaggtgtatctttttcatagtctttaggtacagacataaattcatcaatattttcaagacgactacgtgattcaattgtttgttcacgttctaacatttgacgataacctgatttttcaagtatttcctcaacaatctcactaatttctaaaaattcttgttctttaattaagttttgaaccatttcataaaattgtatacattcttgagttacttttttagagagccctataaaatccacttctcctaatgcatcaaacatactaatattgttatctagtgcatatcgttgaattttatcaactgatgatggccctatccctcttttaggaacattaataattctttgaagactaatatcatcattactatttgccactattcttaaataacttaacaggtctttgatttctttacgatcatagaacttttggccaccaaccatcgtataaggaatatttgatttcataaatgtttcttctaacacacgtgattgtgcatttgttcgatacaaaattgccatatcattatagtcttttccagacttacgatgtttaataatttcacgaactacatattctgcttcgtcacgttcagtcatcgcttcataatatttaatcttttctccaccattatttgcggtccataaccctttaggtttccgttcagtattatgtttaatcacttcatttgcagctgttaaaatggtttttgttgatcgataattttgttctaggaaaatagtctttgcttcaggatagtcttcctcgaaagatagtatattttgaatatctgcaccacgccatccatatattgattgatcagaatcacctacaacacataaatttttaaatttacttgcaagtaatttaacaagtgtatattgtgctttatttgtatcttgatactcatctacatggatgtattgaaatttattttgatagtattctaatgcatctggtacacgttcaaataaacgaatcgttttcatgattaaatcatcaaaatccaatgcttcatttctagatagttgacgttggtatccactatatactgttgcaaccatttgtgaatgaaaatcatttgcttctttcatcgcatcttcgggcgttttcaattcattttttaaattactgatggcaccaataaacattctcggttcaaaacgtttactatcaatattttcatttttaagtacatctttaattacagatttttgatcagttgggtcaataatggtaaagttgcgttcaatgccaatacgatctgcatctcttcttaaaatctttacacacattgaatggaatgttgacatccaaatcacttgagcttcttcaccaaccaagtgttccacacgctctttcatttcttttgcagctttattagtaaacgtaatagctaaaatgttatacggagaaacatctttttcatctaataagtaggctatgcggtgtgttaacacccttgttttacctgaccctgcgccagccatgataagcaaaggaccttctgtcgttctaactgcttcactttgttctttattcatattacttactagagcattcattatttcgactccttctttatttttacagtttttaaagcttttttaatatctgagtatataatattacctacaataattgtatcggcataatttttcatttctttagcttcagttaaagaactaataccaccaccataaaataattgtgtatgggttaacatttgggaagtggcttttacgatatctttatctccatatgtaccactatattctaaatacaaaattggcaacttatacatttcttcaacgagttgagcataagcttcaatatcttcaacatctaactgagtatttgattgcgtaagtttggctactttactatctggattaagaacgacatacccttcaagcatcacttcttcaaaattaatcatatgaccatattgttttaatgctttatgaagcaaaccattatggtatgtcacatcattactatttaatattgagggtataaaataaaagtcaaagccaggcattacgctatctaaatttgaaacctctagtactaaaggtaatggatatcttctaactctactcataagatgaatgacattatcttcagttacatcgtctgtcccaccaatcatgatggcatcagtatctgacatacataaggcttctaaattttcgtcgctaatctctttggcaggatcaagtttaaatacatgctgccactttctaatgtcatacattatccataactccttcttttaacatacactaaattatagcatttttacctttgcaattctaaatccatacactaagtttatactagtacaaattgtaaaaattatattcacaaaaaagagacaattgctatttttagctaagcaattgtctctctttatttattcttttgtttcaacatttaatctctctaaaatcattgtatacgcatcattaccccattgcagtgagcgtttaactctagatatcgtagctgttgatgcaccagatttctgttctatagttgcataagtaaaaccttgctttatcattttagcaacttgaagtctttgagataaagattgaatttcattgactgtacataaatcatcaaagaattgataacattcttctctatctttaagtgttaagatggcatcaaataattcatccaatgcttctcctcttaatttttcaatttgcatctcaagcaacccctattttcaaattaaatataactatattttaacgcattaattaattaaagtgtagttatttcaattgaacatgctaaaactatattagtaactattctaaattagcacgtttgaaaatggtatcgacttggttcaaatgatgttttggatcaaaacactcgtctaattcttctttagataaaacatttgtaatggttgaatcttgttctataagttcacggaaaggtgttttagtttcccaagatttcatcgctttaggttgtactttatcgtatgcttcttcacgaaccatacctttattaattaatgcaagtaaaacgcgttgtgaaaaaataagaccaaatgttttattaatattatttctcatattatcttcaaatactgttaaacggtcgataatattagtaaatctatttaaagcataatctaatgcaattgttacatctggtaacataattcgctctgcagaagaatgagaaatgtctcgttcatgccataatgggacattttcatatgcagttgtaatataaccacgaatcactcttgaaatacctgtaatattttctgaaccgattggattacgtttatgcggcattgctgatgatcctttttgaccttttgcaaatgcttcttcaacttctctcgtttcagttttttgtaaattacgaacttctacagcaaatttttctaatgatgtcgcaattaacgctaaagttgcaatgtaataagcgtgacgatcacgttgaagtgtttgagttgatacaggggctgtgtcaattccaagatgtttacaaacgtaattttcaatttcaggaggaatattggcaaatgttcctactgcgccactcattttcccaacttcaatttctttacgtacctctttaaaacgttttaaattacgtttcatttctgtataccataatgccatttttacgccaaaagtggttggctcagcatgaacaccgtgtgtacgacccatcattaatgtatatttatattttttagctttttcttcaagtactttaataaagcgttcaatatctttttcaataatttcattcgcttgtttaattacataacttaatgcagtatccacaacatctgtagaagttaatccataatgaacccatttacgttcttctccaagtgtttcagatacttgtcttgtaaatgctactacatcatgacgtgtttcttgttcaatttcttttgcacgattgacatccactttagcattttcacgaattttttttacgtcgtccttaggaatatatcctaattcactccaggcttcacaagcaagaatctccacttctaaccatgcttcatatctattttggtctgtccaaatactagacatttcttctcttgaataacgttcaatcattattaaactcctatcttatgtaattatttttataaaaagctgtacattaaatcatttttaagtaaaatagttcgtatttaactctatatttatagtttaacagattctatactaaaagtataaagattttttattctaattgaatataggtttacgaactttataaaaatattaaaaggtctctgacttctaaattgtcaaagacccatatatgagcagttattaaatgtcattttctattttcttaccaacaaattgaatatcttgtcgtaatatctttatatttccttgtttatcttcaaagtaaacaggtttttcaatacgtctgactggcatgtatccttcttttctcatacgtgcaatacaatctgaaatagtttcattttcatttaccttgaacttcactatgttccacaacactttctatttcttctacttcatatgcttttactttcttagttcgaacacctttagtccagaatccaccgtgaatagctctaggttcatacgcaatgataaatgctttttcatctaaactacgaacagtttccattaattttcgttcataacgtctaggtgttaaaatttgcattaccattcgacttccatctctaccatgtgcttcatagtgagtaacaccataacctaaatttcgtaactctttaggtaaatcaaggtcgtattctgcagatgttacgtttacaactgtatagcctaatgcaagcttttcttcaattttcattccaacaatgatacctattgagaatccaaaggcatatgcaataatattttgaatttgatctaaactagacatcactagccctaatccaacaacatatattaaaacttcaagaaaactcactactgctgccatgtaacgatatccttttaacgttaaaattgtgcgcattgtaagaaatgtaacgtaaaaaacgttaatgatgaatatcgctaatatcattatccatggatttgacgttattactgacatattattcctcatttcatttaactaaaattcgaaataattttatcagtcacaaataattttgtcactaaaaactaatagtaattaaatcatttaattattaaagtattcatttattcttttgtatgtgaatgtttaggccaagtatagcgagtatatgctaattctcttttatgtgcatttttaacataatgattctctatcgttgtttttgcatcacttggtacttctttgccttctaagtagtcatcaatttgattataagttacccctaatgcttcctcatcaggtaattgaggtttatcatcttctaaatcagcagtaggcactttttcatataaatgtgttggcgcttctaaatattctaaaagctgtctaccttggcgtttatctagtccaaagataggtgcaatgtcagcagcaccatcaccatatttagtataaaaacctgtgatattttcagctgaatggtccgttcctataacaataccactacgatttgaagcaatagaaaattgtactttcatgcgctctcttgctttttcatttcctctttggaaatctgtaagttcaatacccgcttctttcaatgatgctacactttgatctactgctggtttaatattaactgtaatcacttcatcaggttgaataaaatgaagtgcatcttctacttcatcagcatccttttgtttaccatagggaagtttaactgctataaattggcattctcttccttctttacggagttcttcaactgctaattgcgctaatttaccagtaagtgtagaatcttgaccaccagatatgccaagtactaatgactcaataaatgtatgtgattgaacatagtttttaatgaattggataatctcacgaatttcttgttgactatcaatatgtttctttactttcatttcttttactacgatatcttgtaaattagtcattgtcttcctccatttccttaacatgttctgtcacttcaagaatgcgcttttgtttattattccaacaacttgtgcttaaatctactggatattcttgtggatttaaataacgtttattttcttcccacaattgtgataatgattgttttaaataatcttgagtttctttttcacttggtaagtcataaactaatttaccattttcgaaaattgaatgatgtaaatcaattgcttcaaaatgcttaacatgtttcattttataagtatgaactggatggaacatctttaatggtttttctttattaggattttcatgttcaagcgtgatatagtcaccttcagccttgccagttttagtattaataatacgatatacttttttcttaccaggcgtagtaactttttccgcattatttgatagcttgatacgatctacatattcaccttcattattttcaacagcgacaagtttataaactgctcctaaggctggttgatcataacccgtgatcaatttagtccctataccccaagaatctacttttgcaccctgtgcctttaaactggtaattgtttgctcatctaaatcatttgaagcaatgatttttgcgtctttaaagcctgcatcatcaagcatacgacgagcttttttcgataaatatgcaatgtcaccagaatctaatcttatacctataaaattaatggaatctcctaattcttttgcaactttaattgcagttggtacccctgattttaaagtgtggaacgtatctactaaaaacacacaatttttatgtcgttctgcataaatcttaaatgctttatactcatcaccatatgtttgaactagtgcatgagcatgagttccggaaactggaataccaaataatttgcctgctcggacattacttgttgaatcaaacccaccaatatatgctgcacgtgctccccaaactgcggcgtcaatttcttgtgcacgtcgtgtaccaaattccattaacgtatcttgtggtgcaacttgacgaattctactagctttcgttgtaataagcgtatgaaaatttacaatattaagtaaaatcgtttcaataagttgagcttgaattaatggcgcttctactcgtaataatggttcattcccaaaacacaattccccttcttgcatcgcgcgaatattccctgtaaatttcaaatttttaagatattttaaaaaatcatttttatatcctattgattgtaaatattcgatatcagaatcactaaaatggaagttttctataaattgaatcatcctttttaacccattaaaaacagcatatccacttccaaatggcatatttctgaaatacaaatcaaacactgcatttctttcatgaataccgtcattccagtaactttctgccatatttatttgatataagtcattatgtaacattaaactatcatcttcgtaacgatacatcctcatctctcctaacaacctttttgtatattttatcacaattcagtaatagtgagtattttcgataatagtctttaatttaaaaattaaatttttttaattcgacaaattcatgacacaagtatttattgtatgtgttatatcagtttctcgcttataatactattgaggtgattatatgctattagaagaagctacaaattttatccaaactatgtatggtgaattaaattactcaaatcatactatttctaaacgtatcactgagatagagaaagaaatcaatcggacaggtacctatacacatacttatgaagaactaaattatggcgctaaaatggcatggcgtaattccaatcgatgtgtcgggcgcttattttgggaatcattaaatgttgtggatgcacgagatagttatacagaacaacatttcttagatgcgcttcataatcatttaaacaaagcaacaaatggcggtaaaatcaaaccatatatcactatattttcttcaactgatgcacctaaaatatataacaatcaattaatacgttacgcaggatatgaagataaaggtgatccatcagaacgcgagataacacaattagctaatcatttgggatggaaaggcaaaggttcagactttgacgtgcttcctcttatttatcaattaccaaattcacctataaaatatcatgaatttcctgcttcattgattaaagaagtagatatagaacataatcaatttccaaagctgaaagatttacatttaaaatggtatggtgttcctattatttctaatatggatttgaaaataggtggaattacatatccaactgctccttttaatggttggtacatggttactgaaattgcagttcgtaattttactgatacttaccgctataatttgcttgaaaaagttgcagaaacatttgaatttggtacacttaaaaataattcatttaataaagatcgtacattagtagaattaaattatgcagtttatcactcttttaaatcacagggtgtttctattgttgaccacttaactgctgctaaacaatttgaattatttgaagaaaaagaggaacagcatcatcgtgatgttactggaaaatggtcatggttagccccaccgttatcgccaacgttaactgctaattatcatcatggatacaaaaatattattaaagatcctaatttccattataaaaaagcgacaccgatgaaatgtccattccactaatgtacaagattcatgaggtgacaattcatcatgcatttatattatttaggtcccgaaggtacattttcatatttagccgctaaaaaatatttttcaaaagataattttaacttcataccaaagtctaatttatacgaagtcattaaggcagtaaatagtgacgctcaatctgtagcaattgtacccatagaaaattcaattgaaggaactataaacattgtggcagatgcactggctcaacaacatgtttttgcacatggagaaatacatttagatattaattttggtttatatgcgacaagggactcaaagatagaaaatataaaaaaggtatactctatcgcaccagccatcagtcaaacaagccaatacattcacaaacatcaattttcttacgattatgttgacagtacgattcaaggattagaaaaaatctcctcggatgtagcagccattgtcccagtaggtagtggtgaaatgtacggatatactgctatagagagtaatattcaagattacccgcataatgttacacgttttttagtcataaaaaatgataataactttgagtctaaaacgaataacacaatgctattaattacccctaagtatgacaaagctggattactggcaagtatactgactacatttgcattatttgatattaatttatcatggattgaatcaagaccactgaaaactcaactgggtatgtatcgcttctttgtacaagcagataccgggctatcagataatttgaataaagttatatcgatattagaaacattagatttttcagtgaaaattattggtgcttttcatcgtcaataaaagggagtggacaatatttgtgttaaatgtatcctttcattctgaaaacctaaccgcatcatattaaaaatgcctaggaccactcatgaactcatgatgtcccaggcattttttgtatatttatttaaaatattaagataaaacgtacatagtgaatatatgatttcaagatatttaattttattttaaatttaatgtgtcagaaatatcaaatcctaaaatatatggcattaagaaataaacaactactataataatcactgcagaaattaaattaacccaaactcctactttagccatttctttaatactcaacttacctgatccaaatataatagcatttgggggtgttcctactggtaacatgtaagcacagtttgctgccatagctgcgggtaccattaataacattggatgtacacctactgctacagatagcgcagcaagaataggtaaaatcattgtagcagttgctgtatttgaagtcacttctgttaaaaataacacaaatattgtaatgacaataactattactagtggatgcaccccatctaacatttttagttgctcacctagccattttgctaaaccactttctgaaattccttttgctaaagctaagcctccaccaaataatataagtacaccccatggtaattcttttgccacttcccaatcaataattcgcttatgcttttctttacttttagccggaaatataaaaagtaaaatagaaataaatattgcaattgtaccgtctgcaacttcagatgttattgaaaaattttttaaaataaattctcttgttatccatagtaaacttgcaagaataaaaatagcttgaaccactttttcttcataagacattttaccaagacgattgagtttatcttcaatcaatgtttgaccacccggtaaatacttcaaatcatgtctaaatgcgataaatcttaaataagcccatgctaatgctattaaaataatgactgtaggaataccaacaatcatccatttagcaaagctaatttcttgtccaaaatgttgttcaaattgtccttttagtataatgagtggcggtgttccaataagtgtacctaatcctccgatggtcccagaataaccaatagctaagacaagtgatttttcaaacttcgaaatactatctgatttaacgtcatcatctttcaactcattcgcttctttaataattgctaaaccaataggtatcattatcataacagccgctgtatttgatacaaacattgataggaatcctgtagcaatcatgaagcctaataatattttactcgtgcttgctccaatatatctaataatagttaaagctacacgtgtatgtaaattccatctttccatagcaattgcaagaataaaaccacctaaaaataaaaagataatatcattaccatattcagaagagacttgttcaggcgaaagtacatgtcctaaaggcaaaagtatgagtggtaaaaaactcgttgcagcaattggtatcgcttctgtaatccaccaaatagctatccacaccgtaattcctaaaacatatacccctttgaaaggaagttctactggatgaaagaatgataagataagaacaaacaataacggtcctaaaatgagccccaataattgtcccatagaataagattgatttgtatgatcttttttagaaaaaaatgttaagtattgtgcatttcttcgaaaacctgattgcttagtcatctaattctccccctttaaaattagaaacttaacttaatatattctatttttagaaatatggcatcatctcaacaaagttgatttgatacctattatattgcaaacaagcctcatagaaatctgacttttttgaaaatatataatgatattataacataaaagaaaacgctttattatatatcataataaagtgcgtatcatttatttttcatctataattctttttaaattaaatactaatcaatattaatttttttaactttaactttatcattttgattaaatgtcaaattagaaatatcttctaaatgtaatctttgtgtcgaatgattaaacgaattacctgcaataaaaacattagtatgttttacattattataacttctcacgtgtatagcatctcttttcatttctccttcgaaatgattaccggttacagtcaaattatctccagcttgagtcttttgaacttgtcctgtagaaacatcagccgcattttttccatctttaactccaagaaaacgaataccaccattacaatttataaaggtattatttgagataaacattgtctttgattttaacggagttaatgcatattcattcattccgttaaacacattattccttatatgaatattttcgtaaaagcgattataacgactggcatgagagcctatcgctctattccaagcttgcattttaggttggtttgaatttccaaaatagcaatcttcaatgacaacatttttggtaatcgtgccatcagtcgtaccaaatttaggaaatgacccaggcacttgaatgtctaattgaattgcttcagaaaatgagcgatcaccatttacatcaaaaaagcctttaaacttacagttcttaatatataaaccattgattccacaagcatctagtgcatgtccacctacaacatcaagtactgtaatatctattaactcgatatcttcagcatgacctatagacattgcggtattattataggggtactttgaaccgttcatatcaaatataccaccttttattttaatatgcccatttccttgatatccatgatagaaaccaaattttttaccattttttaacaatgcatctctcgagtgacgttgcaagatggtatcatcttctaatattaaagtggtataatcatatatcactaatgctttactaatataataactcccagatggtatataaactgtatgttctccatatcttgcggcattaagtgctttttgtatagctttagtatctcttcgtttatgttttccttttaaaccaaaatcctgtgcattgatcaatattttttatcccctatcttatgttgttattaaatatatttgtaaccataatggtgtatagctatactatatttataatttaatattatacattttttaaggtattcaaacatttattaagaaagggatgtttattatgactaacaaagcattgattgttgtagattattcttatgattttatcgctgatgacggccgattaacttgtggtaaaccaggccaagatattgaacagtttattgtagaaagactcaatcaatatcaacatcaacatgataatatctttttcatgatggatttacattttgaagaagacccgtatcatcctgaaactaaattattcccaccacataacattgaaggcacttcaggtcgtcaattatatggtaaggtaaaatcattttttgataaatataaaaatgaagatactgtacattatttagataagcgacgttatgattctttttatggtactgctttagatagtttattaagagaaagacatattgatactgttgaaattgtaggtgtatgtactgatatatgtgtactccatacagcaatttctgcttataatttaggctatcatattattatccctgaacaaggtgttgcctcatttaatgaagagggtcatcagttcgctttagctcattttaaaaactcattaggtgcaaaggtagaagttatcaattaaaacatgctaaaataaggataaatttaaaaattaagggtgaataaatcaatggcaaaaacttatatttttggacatcaaaatccggatacagatgcaatatcttcagctattataatggctgattttgaacaacaaactggaaattctgaagcaactccttatcgcttaggtgaagtgagtgctgaaacaaaatatgcattagatcattttaaagttgatgcaccaactttattaaatgatgatttagaaggtcaagacgttatcttagttgaccacaatgaattccaacaaagtgctgaaactattgctaaagcgaatattgtgaatgtcgtagatcatcatagaattgtgaactttgaaacagcaggtcctttatactatcgtgcagaacctgtaggttgtactgctacaattctttataaaatgtataaagaacgtaactttaagattaaacctgaaattgctggattaatgatttcagctattatttcagatagtttattatttaaatctccaacatgtactgaagaagatgtaaatgctgctaaagcattaaaagacattgctaatgtcgatttagatgaatatggtttagaaatgttgaaagcaggtgcttcaacaactgataaatctgctgaagagttattaaatatggatgctaaatcatttaatatgggagattatgttactcgtattgctcaagtcaatactgtagatattgatgaagtcttaaatcgtaaagatgaattggaaaaagcaatgttagaaacaagtgcaaacgaaaaatatgatttatttgtattagttgtcactgatattattaacagtgattctaaaattttagttgtcggggctgaaaaggataaagttggtcaagccttcaatgttcaattagatgatggtatggctttcttatcaggtgtagtttctcgtaaaaaacaagttgtacctcaaatcactgaaattttaactaaataattcatattttaattcatatataataaggctgagatagtaggttacttaactctcagccttttttaatttattttaatcattcattcaaatgttttaaccttggatacatttaactaaaattatatagtcaactacacctataacggtattgggattgactgtacaggaggtactacaattgaatttaatagaaaaacaatttcaagaaagtaaacagttttttaaaacacatcaaactaaagatatcaaatttcgtaaacaacagttaaaactattaagtaaaagtattaaagaccatgaaacagaattattagagtcgttaaaaatagacttagggaaaggttcagtagaagcgtatgctactgaaattggtatacttttaaaaagtataaaaacagctcgtaaagaattaaaaaactgggctaaaactaagcaagtagatacaccactatttatgtttccatcaaagagttatattaagcctgagccctatgggacaatattaattatcggtccatttaattatcctgtacaacttttattcgaacctcttattggtgctatagcagctggtaataacgccatcattaaaccttctgaacttactcctcatgttgcacaagtagtgcgaaaagtgattgaagatgtgtttgcaagcgattttgtagctgtcgttgaaggtggcgttgaagaaactcaaacattaatcaatcttccatttgattatatattctttactggtagcgaaaatgtaggtcgaattgtttacgaagcagcaagtaaaaatttagttcctgtcacacttgaacttggtggtaaatcaccagtgattgtagatgaaactgctaatattaaagtagcaagtgatcgtattagcttcggtaaattcaccaatgctggtcaaacttgcgtagcaccagattatattttagtgaatagaaaagttaaaaatgaattaattcaagcatttaaacaatctattgaagaattctatggcaaaaatattcaaaatagccctgattttggacgtattgttaatacaaaacatttcaatcgactttctgaattattagcaatacatcgtaatgaagtgatttttggtgggcatacggatgaaaatgaacaatatatcgaacctacaattttagacggtattactccacaatctaaaattatggaagaagaaatttttggtccattattaccaatcatcgtctacgatgattttaatgaagcgatagatattattcaaagcaaatctaaacctctaagcttatatttatttagtgaagatgaaaatacaacgaactgtgtgctagaagaattgtcatttggtggcggtgcaatcaatgacactttaatgcatttagctaacccaaatttaccctttggtggcgtaggtgcttcaggaattggcgaatatcatggcaaatattcatttgatacatttagtcatatgaaatcatatatttttaaatctactcgactagattcgagtattatctatcccccttataaaggtaaattcaaatatattagaacatttttcaaaaacttataaaaaaatccctataatggctcactttacaagtgtttacattataggggtattttttatctataacgatgaattcaagaaatcaacaaatacaccttcaggtgcggtatactgattgtcagtagcaatcaacataccactatttgtatcacgtctaaatactgttaacgcgtaatttccttcttgatgtgcacatacaaggtattcatctgactcagtaatattaaaatctcttggaaattctcccccgctttttactatttcaaccgggttaattccttttccatcgtcaactactgtaaatatcgctatactatcatgtccacgattactaatatataaattttgttcatcatgagatagtctcacagctgctaatttagtttcttcagtgaaatcttcaggaatcgttaaatgacgttcaatttcttcaaattttccatcatgatattgtacaacgcttactctattagataactcatgaacaacatacgcgtatttcccattattatggaattcaatatgacgcggtccatcttcagcatggaattctgataccgcatgttctttaaacccttcaactccgaatgtatatgttacaattttatctgcacctaaatcagtcacagctacatatttatggtcaggggtttctctaataaaatgaatatgattatgatcttgacgctcatgtgttccagttggataactatgttctaactcttcaattaattttaccacttcgcctgtctcaggattaagttgatatatacgtgctattccagcagtataaactgcttcgaataagaagttatgatcactagaaacagaaatataacaccctgttccattctctgaagctaaacatttattaatgagtgtaagctgtccattctcgtcttttttaaatgcagccacaccacatgcctcattctctttagtaattgcatacaaaaattgttcagtttgagcaagataagtcgatgcttcgatatcatatcctgtatctactgattgtatttctccattatcttcattaagttcgaatatataaatacccttaccttctttttttgtataagaccccacataacctttagttgtcattttaatacctccattatattcaatattattaacatttatactagctaattgtatttatttaagagtaataaaaaaaccagtaacttcaaatgaaattactggtatatggtacatcgttgcattaagcattattgctttcaatatcagatacgatttcttttgtttttctttcgatatcttcaaagtcttttttgaaaataaagccaaatactactactactacaccaacaactagtgctgtaatagctgtaaagcttaataagaatttaaataaacctttaatgaaatcccacatttatgtttcacccctgtacttaaaataaatacgtttacattaaataattttaacatagttaacgttatgattaaatacatacctttttatatattatttcaaacctaaaattaaagatttttaaaaaatcaaatattttttctttatttataatgaatgacattggtcttatttacacagtgaattactatcatatataaataaacattataaggctttaaatttaatataaattattgttcaatataaataataaaacaaatgataggaggatttttcatgcaagaagttaagtcagatattatgacctttcgcggatcacattttgatttaggtatcaaaactgctcagtggttaaaacagacgcccttactagaaaatagagaacgtgaatggaagaagcgtatacctcgttttgacattgatgttaatgaaacatatagcattttccaaacgtatgcaccagaaatctgggaagaattattaggaatgcaagagatattaaatttaccgactaaacaaatgattttaaatttcggtcactatcgttttactgatttaaatgaaagtggatgtacagtttttcaaggtaaagattatatggttcgtaattatgactatcatcctgctacatatgatggcagatatcttctttatcaaccaaatgatggtggactcgcgcaaataggaccaacctctagagtaactggtcgtatggatggtatgaatgaagcaggtcttgtgatgggatataattttatgcaccgtaagcatcctgcaaatggatttgtatgttatatggtaggacgacttgtcttagaatattgtaaagatgtaaaagaagcaattcaatttctaaaagagttaccccatagaagttcatttagttatattttaatggataagcatttaaatcatgcaattgttgaaattacgccacgctcatttgatgttagatatgataaagtttgtactaatcactttgaaatattaacacatgaaaatcgtaactataccaaagaatctaaagaacgtcttgctcgcacaattagtcaaacttcagaaggtatagataaatatactgcgtttaaactttttaatgatcctaaatataatatttatagtaagttgtttaaaagttggtcaggaacgattcatacatcaatgtatgaacctaaacatttaaaagcttggatgacattaggtgagaataacccccctctatctatcgactttcagtcatggttagagggtcatgaacttgatttaatagaatttactggaaagctagatactgatttaacatttgctacgtattaataaaaaaagattagataaacgttttaaaatttaattaatcaacgttttgtctaatctttttcatcctatttaatatttatatcacctttaacgttataacactctataatattataactatcacctactttgctatctttaaaataaggattcttaatgttattgtcacccattcctggatgtagttttaacaaggtgtctttaggcttagttttatactcaatgtttatatcaccttttttacttgagctcttcatatcaatttgacttggcatgtttttaaagtcaagttttccttcatttgtaatgaataacccatttttcaaggtacaatgattaaccacaatattagaatttattactttaaattgactatttttaatatcactatttttaatattaattgttccatgatcgctataataatcaatacgatcaagtttagcttctttgatatttaaattttctccgtcttttctaattctggcttttttgatatctatattattaatatttaattttcctaatttagcatcaatatttaattgttttaatttatcaggtggaatagttatatgtatgttgaacttgcttcttttaaaagggtttaaattaaagctataccctcttttagaagaacgtgattcttttacatttaagctgtctttttgagtgttcacttttatactattgtccccgtaatatttcactctaaatgaagaaccttgagtaatagtgatatcagaactataactatctatattcaatttggagatagatgattgatgaaacgtttcattatatttcagtcgtttataaatatctttatcatgaacaaaccataccaacgttgctgctagaaaaaaaacaacaaatataactaatccacttattgttaactttttcatcactggattcttcctttaattatttttatataccatgataaatattttaaaacaagtttatataaattctgaacaatttttattattgcaacgaacgctaatatacctattccagcataagaaatactataaagaaaattactaaaagagtcaggagtgcttttaaggatactaataataattaataagataggtaaacaaataagcacaattgaaatgacgaaaacaaaggctagaaatattaagaatattatcattgggataacaattaagaaaaaagaaataacacccaaacttaatgatgccataatagcttttacaatattacgaaagttaggtgtaactttagcatgtgaaattgcttctttagcttttatttcttttccaatagtataaggatttttcaaatcatctaatatttgagcatctgttttgccttttgtttcttgattataaaagatatcttcatattcattcattactttatctttgtctttacgtggtaaatcatcaagctccgtttccagttcattcaaaaaagtaattttatccatttctctttcacatactttcttaaaatataaatttatttttattaactatcaacgactaaagaattcaattcgcttaacaatattatctttatataaaattgataatttcatgtgatgatctttatcaagatatactaaagcatcataacctttacctaccttatctttgtcatagttataacctagattatctataacagcatcgattgggtcacctatatgaacatcaaaatttgtgttaacaaaagtatctttaactaagataattcctttaattttgtgatgttttttcttgacttttattgttaaatttttatatttattatgattataaaaaatatacctatctaatttcacatgcttatttaaactatattctgagttatcaaacgtttcattaagctttagatgattaatttctacatcacttaaatcaaccgttttttcatttttataaattgtcaatcctagtacaactaataaagaaatgacaataaataaaattgagataacccatctattttgaatatgcaataggaccaccacttatatacttattttttttaatatatcataactatgattatattcaaaaaaatattaaagtatctttcaatgcaaataaaactggcgacaaaaattgaacgtatcgtcgccagttttattaaaaagttattaatttaaatgtctcgtttagcagcataaagtacatcagcgataaataaaataacaatagatgcaatagaaatgaaccattgccaattcgtaaattcaatactacctgatgatgatttttctgttaagtaactaaaaggtatatatttgagtgatttttgaatattatcgccccattcagggattaaacctaaaaatggttgtaaaaatggtacgataaacactaaaaagatacctaatgtaaaaatgactgctggtttttgtacaattaaagtaattaagaataataatagtccaaaaaatagtaaaaagataagatagaaccaaatatttgttaggaatttatctccatttaaatttttaccatctgtaaaagtttgaataactaaaagtgtaacatacgtgataagtgtaaatatgaacgaaaaaataataatcgaaatcgtttttgctatcacataacctactctatttttcactttattcatataaagttgaatcgttccttgagaataatcacgtgtaattgttttaataacaacaagtaaaccaaagaatagaaacatccaatttgccattggtaatatcattgaataatcgactttatcagtattttttgctaatagtacagtcattgctgtgatgataccccaaatacatataagcgcgatatatgttaaataactttttaaaaaacttaatatatcatatttaactaattgtaaactcttcatttaatggtcacctctttgattaatattaaagtacgtatctcgaagcgaatttttacgtgtttcaatatatttaggatacacattaatatgtgcgagcgctttaagcaatgttcgataatctcgttctgctttaataagaatttctccattttgtttataagaatgaataacattaaaatgttcttgtaaataatttagcgcttgatcaaaatcatcattgtccaacgtaatagaggtactttcttctgcactaccatctttcatattgacatcttgaacgaaatgtccatctcttaaaaagacagctctatcacaaattaattcgatgtcttctaatttatgacttgaaataagaattttcatatttaattcatttactaaagattgtatcgtttctagaacatcgattgagccatctggatccatgccattggtcggttcatccaaaataagatattttggtttattcattaatgatacagcaatcgctaatttttgtttcatacccattgaatattttttaacttttttcttaatatacggacgcataccaaaagcatctataattttatctgaatatgctttatcaaatccttgaccaagcacctgagcaaagagtcttaaattataaagtcctgttttattatcataaagttttggatgttcaatgagatagccaatattttcatcatcttttaaattaactttacctttgtaattaataatatttccattcatcactttcatcagtgtagttttacccacaccgtttttaccaatgagtcctacaattttgctatctccaaaatcaaaatctatattgtctaaaacattattattaccgtatattttagtaatattttctaatttcataaaagtcctccttttttctagcgacgattaacacgtgctatttgaataaaataatttataactagccaaatcacacttataataactaatccaatacttaaatatttattaaatacatttggatcaagtgcattatgaaagataaataaattaatagtcaaaaagataaatgcaattgccatcggtatagcaagtaccattaaaataatataaacagtgtaagaaatatattctctttttctttctgtacttttactaaaggcaataggaatgctaaataaatttacacttaaaaatgaaagtgctgtcgaataacgcaactcatttacctgaatatttgttgattgaaaattatataatccaataatcaatgttcctaaaatcgttaatataatacatgtcagataatttgcattaagcaattctttcttagttattggtaaactttcataaaaaagatacgactcttttccacctaaccgtctatgtactctaaataattgtcctgaatctaaaatgcttataatcattaatgtaatggcaagtggaatatatacaacgaaaccataacttgtttttgaaaaaaatagtgtataaataggattaataacaataagcactaaataaatgataagtgtccaacgtcttaacttaaaatttcttattattagttgcttcatgccatcaacccatttctatttggagtttcaacatcattagtttctttcattttctcaaggtaaatcattaattcttcaatcgttggatgttttatttcaacttgttttccaaataattccttaaatgcttgaccatgttttgtaaaaccgacataacctgtatgcttttcttctttatataaaaggagttgatttaattcatcatctaaatctttgttatcaccttttacgataaaatattcctcttttatatcatcacaatagccttcaagtacaagattgcctgtttttatatatacaagataatctgctattttttctaagtctgaaataatatgagtcgaaataaaaaccgttttattttcatctattaattcttgctgcaatatttctagaacttcatttcttacaattggatctaaacctgctgttggttcatctaatataaataactcagcgtggtgacttaaagcaatggctaaagataacttcattttcattccactagagaaatgcttaattttaagatgacttggtatattgaattgctctaaatactgatggaatatatgactatcccacttagaataaaaaggagaaatcatattttctagtttttttatattccattgttggttgaaataaatttctgagtaaacaaaaccaattttatttttaatccattttgctgattctttcatttgtcgtcctaagattttaatttctccagtattaggttcaagtaaatccatcattaatcgaatcattgttgtcttgccagcaccattactcccaataaagcccgtaacaaatccttgaggaatactgaatgaaagatctttgatttggaaagttttagtgttataacttacgtgtttaacttcaatcgctttcattcatcttcctcctcgtaaattaaagctaaaacttcatttaattcttttagaggcataccaattgtttttgcttcttttaccatggaacgtgcaagatgttcaattacaaaaaattgtttttcttttaaaattgaactatcttgttcttttacgaatgttcctttacctcttattgttgtgacaaacccttctttttccaaatcttcataggcacgctttgttgtaattaaactgacttgcaaatctttcgccagttccctcatagatggtaagtgacttccagcttcaacgtaaccttttaatatattttctttaatttgttgtttaatttgttcataaatgggctgttcactggtgttttttagaataactttcatttatgtccccctttacaactgtatataaataatatatacagtatatacagatttgtaaagtgaaataataaaaataagataaaatcagtattcttaagacataaattgtatatacactataaacatagttaaacaaaaaaactatgatacagtattacagtggtaattgcatcatagttttcatatgttactttttatttttacgtctgtcattgctacgattaataaatgcacatatcataaacataatggcagccaataataactttataccttgactttcatgtccagtggcttgtagataatatccaatgacaaacaaaacaatagctaaacctacaaaaatttttgttaggtgtttcatcatttttagtcacctcattataataattatatcaaattttttattttatatgcattaatcatttatttaattaaaattgaattgtatttgttctatgttaagatagtgttatatccacaaattgcattacaccccctaacttgccacatcaagttaaggggtttttgtgtaaggtcatcttatttatttttccacttagtttctaaccaaactcgaaatataatcagcatactccctgttataagcgtgactaaactttctaataaccacgacattacactacacctccacaaagtaaagtgtcatatctcatgatgacctatatatatattttaacacacaaacagaacatacgttccgtttacggataaaaacacttctctgctttattttttattagaaaactttatattttgtttaattcaagataatatataatgtgaataacaatttaaagcgaggttatgaaaatgaatcctttagcacaacatttaaacgatcaactaggcgatgaccgtcctgaaatattaagcatgttatcgacattaggtcaatctatgttttatcccaaaggtattctgtctcagtctgcagaagctaaatcaacaaaatacaatgcaacaattggtatggcaactaatgataaaggaaaaatgtatgcagacacattatttgatgtctacaatcatctttcgcctgatgagattttcccatatgctccgccacaaggaattgaaactttaagagatttatggcaacaaaaaatgttaaaagaaaatcctagtttaaaagcttcatctataagccgtccgatcgtgacgaatgcattaacccatggtttatctttagttgctgacttatttgtaaatgatgaagatacaattttattaccaacacataactggggaaactataaacttatttttaatacaagacataaggcaaatattgaaacttatgctattttcgatcaagatggatattatacaacaaactcacttatatctactttagataattttaaacaagataaagctattattatcttaaactatcctaataatccaactggctatacacctactaaagaagaagttcgtacaattgtctcagcaattgaacgcttagcagaaaaaggaactaaggtgattacagtcgtagatgatgcatactatggtttattttatgaagatgtctatacacaatctatttttactgcaattactcaattagattcaaaaaatattttaccgatacgccttgacggtgcaactaaagaattttttgcttggggtttacgtgttggctttcttacatttggattaagtaatcaaaaagctaaagacgtattagaggctaaagttaaaggattaattagaagtaatatttcaagtggagcaatgccttctcaaagtgcaattaaatatatactagagaatcatgaacaatttgataaagaaattcaagctaatgtaaaaacattacaagaacgttatgaagtaacaaaagaagtggtttatgatgaaaaatataaacaacattggcaagcatatgattttaactctggatactttatggcacttaaagtaatcggtgttaacccagaaaaacttcgtgttcatttaatcgataactattcaattggtattattgcacttaatgatacagatattcgtattgcttttagttgtgttgaaaaaaacgatattccacatgtttttgattctattgctaaagcaattgatgacttaaaataacataaaagtataatagcgagagacctaaccaggaaggttctcgctattttttaatgacttgtaataaaatctaacaatttaaacattacttctttattctctcttggtacttcttggttaagaatctggtctggcgtttgatttaatacggaatcaaacacgtatggagcatcattcatgacaatctcttttatatcatgagcacctggttcaaaatgaaattgtagtccgataatattattattcaaaataaatccttgattttttaaatattgacttgaaaataataattgtgcatttttaggtatataaaatgtttcttcatgccaatgtaatgccatcaattcttttggaatattaggaatgatggatgactcacgataaactttattccaaccgacttcttttactggagattttcctacagtatatcctagggctttagtaatttgttgagcgccaaaacatataccaaatattggcttattttgctgtattaaattgcgaattaattctcgttcttcaaaaatccatttatcctcattattaggactcatgggtcctcctaaaataataagtaaatctgtttctttaacattgggaaggataccactattaaaataaggatgataaatatataattcatggtgatgctcggtagcccaatctctgataactccaggaccttcattaggggtatgttgtaaaatattaatcctcattgttgattctcctttaaaagtcaatgtttatttatatctttgctatcattatacttcgaaacacttaaaataaatactataaaaattatataatttttatatttaaaaaacttttataagcactccaatatataaaaggaatctaagacaatcattttttgccatagactccaatataaaactcatacttttctattttctattaagtcactatagtatttaatagggttcattctatctttccatctaatataaatcagtgttccaccatgttttttgagtttttcattactagcaccacgttcaaatgaagacgctagttcaatattcatattaggattaacatttaataattttgcataccatttaacccatacatcacctttgactggatcattttgaattaactaatcaatatttcagtacagattcactttataatcaaaaccgtcagaaaattaaataacaacataaatataaaaagcaagaattcttttatcactatattaatctatattattattttgattattaaatttagcatttttatttattatctttttttcaatttgtatattaaataaaattgttaaaaatcaaaagatgtaaaatttcgacaagttttatgtaaaaattgttcaaattatatttaaagatatcagtgaaattaaataagtaattaaagaatatatctacttttttaatacaaaaaactaacattaaaaatggctgattttgcataaaacaaaaccaaccatatcttttaattatttacttgtctatttgactgagcgcacttcaaaatgaacttatcagtctttttattatattttctaaatttctataaccatgaccagtaaaaacacaaaacattgatatatcaacatttataggtgtttttacatcatacctggcataccacccattgcagcattgtcattactttcaggttctggaatatttgcaactaccgcttcagtagttaagaacattgcagcaacacttgcagcgtgttgtaaagctgaacgtgttaccttagtaggatctacaataccttcttcaagcatattcacccactcgtttgtagcagcattgaatccgacacctgcatcagcatgtttaagtctttcaacaataactgaaccttctaatccagcattttcagcaatttggcgtactggtgctgataaagctttaagtacaatattaacacctgtcgcaacatcgccttccgcttctatttcttcaactttattatagatattaactaaagctgtaccaccacctgcaacaataccttcttcaactgcagcgcgtgtagaatttaatgcatcttcaatacgtaatttacgttcttttaattctgtttcagaagcagcacctacttttatcactgctacaccaccagctaatttagcaagacgttcttgtaatttttctctatcaaagtctgaatcagtttcttcaatttgtgctttgatttgacttactcgtgcatcaatactgttatcgtctccatcaccatcaacaacagttgtattatcttttgttacttctactttatttgcagtacctaacatatcaatcgaagcatcttttaattctaatcctaaatcatctgtaatcactgttgcaccagtcaatattgctaaatcttctaacattgctttacgacgatcaccaaagccaggtgctttaacagctacagcagtgaaagtgcctctcatgcggtttaatacaatatttgttaatgcatcaccttcaacttcatctgccacgattaagattggtcggcttgattgaacaacttgttctaataaaggtaatatatcttggaatgatgaaattttcttatctgtaactaaaatatatggtctttctaattccgcaatcattttatcagaatctgttaccatatatggagattgataacctctatcaaattgcataccttctacaacttctaattccgtatcaagtccattagattcttcaattgtaataacaccgtcattacctactttatccattgcttcagaaatatatttaccaatttcttcatcagcagcagaaattgcacctacttgtgcgatttcatttttattttcaactttttgagaaatgtcatgtaatgcttcaactgctactctgactgctttatcaatgccttcacgtaaaccaactggatttgcaccacttgttacgtttttcaaaccttcttgaatcattgcttgtgctaatactgtagcagttgtagtaccatcaccagcaatttcatttgttttatttgctacttcttgaactaacttagcacccatattttcatatggatcttctaattcaatttctttggcaattgttacaccatcgtttgtaattaaaggtgcaacatattctttatctaatacaacatttcgacctttaggaccaattgttactttaacagcgtttgctaatttatccacaccacgtaacattgcttgtcgtgcatcttctgaaaatttaagatctttagccatttatacaacctccattaatattaatcctgtttttcgacaattttatatagttatttttacttttctataattgctaatatatcttctacatttaaaattaaatagctttcttctccacgtttaatctctgatccagcatattcttgaaatactactgaatcaccttcttttacttcgggagcaactgtctcaccattatcaagaagacgtccgctgcctactgcaactacaacaccttcgttagatttttcttttgcgctatcagttaaaacgattccacttttagttgtttgttcttgttcttttctttcgataatcacacgatttcctaatggtttaagcatgattgttcctccttagcagggtctatttagcactttaatataatgagtgctaatctaatttttataataatcaaatttggtcaatatttcaagtaaaaactctctcttacttttgtacatctgagttttttacgataaaataagaataattgatatttaatctggaggtttcaaatggcaagaatttgggtggcaatactaacattaattatatatgctttagcacaatttttacccttagttctagcacaaacgcctatatttagtcgtttatcaggtatggctttagctagggctggggtgtatactcaagttatcttatttatacttgcagcaattttaatcatcttttttcatttcaaaattaagaatcctacaaacttagagcaagaacataaagaatcaaaacgttatattatcccatgggctatacttggctttttcatagttatgttatatcaagttattgtaggtgtgattaacatatggattttcggtcaaccacaacaaagtccaaatactcaacgaataatggctgtagcaaaacaacttcctatttttattatattaatttctgttgtaggccctattttagaagaatatgtatttagaaaagtgttctttggtgaactatatgatcgaattaaaggaaatagaatcattgccttcttaattgcttctaccgtaagttctttactttttgcattagcgcataatgatattaaatttattcttatttattttggtatggggatgatactttcgttagcttatactttaacaaaacgaatttctgtgccgatacttattcatatatttcaaaatggcttcgttgtagtaatgcaatttttccttggcgattcattaaatcatttgaaacaacaaactcaatttattattcacttgtgtaattagcacataatttatcttaataaataaaagcatcgaatgctctagacatttgatgcttttacttttttttcgtttttaaattttgatatacataaattatcattacagtggaagatattaaaattaaagtaggaatcagtgtcatattcaaagtttttatatatgattttgattctgtttttttatgagaagaagtaatgacttttttatgttgttcttcttctacttcatccttatgaattgtttttggcttttttaaatcaggcatagagccaatgtcacttgtaattaatgataaaacttgctcatctaaatttttataatattctttagcattaagtggattaaaatattgaaatctaaagtattgagaatcctcttgtaatatatttagattttgattatcaaatttttgtttcttaattaaacgattaaaatctttatttgttatctttttaccattatcatctaaatgattaatcttattaataatataagggttgtacttataagcaccttttgcatattgattaaacctatttaagatattttctgaaaatcttgactctatttgatatgcatttcgataagtggattcttttcctctatcactttggaaatatagattattttgctttaaatgtgttggttcaaaattattatgattgttttcaactagttgtcgtgaaaccaattggttaaacattgttttggaaatactattttgagacttatccttttgataagtagtttttgagtaaacattggatgaagtattatcattatatggttgtatgatttgattttgtttcgacttcattgatttagaccttacattttgatgttcttcttgcttaaaaatagttgaatcatcatttttataatttttacttttttgtgctgttttatatttagtatgatttttttctttagaagatgacgtgttatttttatgaatatgttctattccactcttttgttgattcttatcattaactttttctttttttagttcttcaaggctattagtttcgtcgctttcttttcgtgattcttctgctgttgatttttctgtgctattagtctcgtcgctttcttttcgtgactcttctactgttgatttttctttactgttagtctcgtcactttcttgttgtgattcttctactgctgatttttctttactgttagtctcgttgctttcttgttgtgactcttctactgttgatttttctttactgttagtctcgtcactttcttgttgggactcttctgctgctgatttttctttactgttagtctcgtcgctttcttgatgtatattttctatttttggttcttctgtgttgctagtttcatcactagtataattaaatttttttatgttttccttacttagtttaattttagattgctgagtatcagaatttatttgtgagtttactttctgatctacgccttcactctctatattagaagaggtttcagcataactatagtgactgaatatagttgcacttatagcaaaaataagacttgttcgaataactttttgttttatcattctgagacctcctcttatttttaacaattttagtataaagaaataaaaaatatcatgcatgtatataaacaaattgataaaaaacattaatatttatgaaatttttgttatataataatttacttattctagtataaattttatacaagaaatatattaaaaaaaggagattataagatggaattatttgataaagaaaacacaaaaccatttctaactgaaattgaaaatagacgtacaatttataaaactaaaacatctatttctattagtgatgaagaattagaggaaatgattgaacatattgtaaaatacatgccttcagcttttaattcacaatcaacacgtattgttttgttacttaatgatcaacatattaaattctgggaaaatgctaaaactgtacttaaagatgtaatgggaccagatcgtgactttgaacctacaaatcaaagaattaatggtttcgagcatgcctacggaactattttatattttgaagatgaagatgttataaaatcattacaagaacaaatgccatcatatgctgataattttgctaactgggctgttcaaacaaatgctatgcatcaatacgcaatttggactgcactaagttcaaaaggtatcggtgcatcgttacaacactataatccactagttgatcaagttacaacacaaacatttgatattccagcatcatggaaacttgtagcacaaatgccatttggtgatattgaagaacaagctggtgaaaaagaaattcaccctactgatcaacgatttattattaaaaaataataaatttaaacttatcaatgaagtacattacaattaagttattttactttaattgtaatgtgcttcattttgcttttcctagccaaatttagtaaattgaaattattaagcaggttgaggagtggttaaagtgaaaatacaaatattccaatttcatgtcgaatatggaaatgttgagaaaaatgaacaaaaaatttcagaatggtttaatactcaattagatgatgatactgaagttgttgtgttaccagaaatgtggaacaatggctatgctttagaagaattaaatgaaaaagcagatcaagcattatcacgtagttttccttttatttcgaatattgctcaaacatatcaagttgacatcgtcgcaggatctgtttcaaataaacaaaataataaagtttataatactgcttttactgtctctaaaaaaggtcgtcgtattaacaaatatgataaagttcatttagttccaatgctaaatgaaccagaatttttagaggatggaaaaacagttccagaaccatttgctttatcatcaggtgctctcaccactcaaattatatgctatgacttaagattccctgaattgctaagatatccatctagagaaggtgctcaaatcgcattttatgtcgctgaatggccaacatctcgacttaatcattggagaaacttacttcaagctagagctatagaaaatgatatttttatcgtcgcatgtaatggcacaggtcatgatggaaatactgaatacgctggacattcaatggttatcaatcctaatggagatattcttgttgagttaaacagagaagaagatactatttcagttgatatcaacattcaagaagtatcacgtcaaagagatgctattccaatctttagaaatttaaaacctcatttatataaataaaaaaagtcgtgagcttgggagagactcacgacttttaattaagggaatgttttacagttatttttcaatcttttggggatgttattaattatgaaaaattacattgcataacaatgttatgatagcttgcatattgaaaataattaccttctattcagaatagctaagttaattattttctactgagttaacacttcagcgagtcttatgcatttctcatcaataagttgggatagcttattaatgaatggaactacacaaagaaataaataaatgaaatattttactatgaaaatcgatattatcgaataacccattggtctcgatcatcacaaatacatagtcaaattacacaaacattccttacaactcatcgataaatcaacttttaatttcgcaactactaacaaaatcaaaaaaagatttattcgaataaaacaaagactaacaatttaaagactaagattattaagttgatatcactttaatgtgatatgagtatattaaaacataacattcatttaagtaattaaaaatttcttaacttgcaactttttctactaaactgtttatttttatatggtaaaatatgagttatcgaattactttaacagttaagtattaaattttaacagttaagcattattttacagactaattgcacaaaattgtataatatagtcaaggagagtggcacaatattgaaagcaattgatgataaaattgagcactttgcatcttatttacagaagaaaaacaaccttgatcatatccaattcttaaaagtacgattaggcatgcaagtggttgttagtaatattgctaaaacaattgtgacatatggtgctgcgctcatattccatacatttttgtatactttaatcacacacattagttattttttaattcgacacaatgcacacggggcgcatgcaaagtctactttgctatgccatattcaaaatttaatcttatttgttggtttaccatggctcattgcttactatcatattaatatgggtatcatgtatagtgttagtggccttgcattattactgattattatttatgcaccagctgccactaagaaacaacccatacccgaacgactaaaacctcgcaaaaaaataaagtctattattttagtagtggttttaatcattatttctattatagtaccagagccatataaacaattaattttattaggtatgatacttgaaagtacaacactattaccattcttttttcctaaggaggattattaattatgacatttattacagatttattcattaaactattctcattaatcttagaaactgttggtacacttgcttcttattcaccttgtgcaacttattttgatgaaccagaagttcctaaagagttaacaaatttagaaagatagtattttaagaaagtgtgtgtgccatggatttattatctaatgtacctttagctttatttcaaggttttctcctttttataattgctaaaatagtttcaaatattaaatataaaacaagggattatttaatcgttttagcgattataatcccttctgctcttttgtattattttttcggaagtatatctatattatatttacttatcagttgcggaatatttttttattataaaataaagttttattctataatcacagttttgggcagcgcaatattaatgtttttaagtaattttatcgttttctttttaataatttttattgaaaatacattagataatcagtatttaattttaatgatatatttaactttgttttcattaatctctattattcttgcttatacttttaaaattgtatttaaaaaatttaagcaatcctatctatctattaataaaacttatttaattattattacaattgttttagtttcatcatttatcattttactaatatattcgcaaacacctagaattaataatgcttctttaaaaatttatgggctaatttttattggaataattatattttttatcaccttaatcattataatttctagatatacactacgtgaacttcgctacagacgtaatatggaagaaattgaaacatattatgaatacacactacaaatagaatcgattaataatgaaatgcgtaagtttagacatgattatgtcaatattcttactacaatgtcagaatacataagagaaaatgatatggatggtttaaagacatattttaatgacaatattgttcctatgaaagataaccttcaaatgaactcaatcaaaattaatggtacggataatttaaaagtgcgtgctattaaaggattgataacaactaaaattttacaagctcaagaaaaaaatatacctattagtattgaggtgccagagttaattgatcatattgagatgaatacggttgatttaagtcgtatcattgggattatcattgataacgctattgaggcttcagaagaattagaagatgccttaattagaattgcatttatcaatgtcgaaacgtcagtcatgtttattgttatgaataaatgtaaagaagatatgccgaaaatccatgaattatttcaagactccttttcaactaaaggagataacagaggacttggtctaacgactttaaaagaaattactgatactactgaaaacgtgttacttgatacgactatagaaaatggctacttcgttcaaaaagtagaaattataaataatatgccataaggatgtgagaaaatgaaaatattcatttgtgaagacgatgtgaaacaacgtgaaaatatggtttcaattattaacaactatataatgattgaagaaaaaccgatggaaatagcgttagcgacagatgatccttatgaaattattgaacagtcaaaagaaatgaatgatgttggatgttattttttagatatacaattggaagctgatattaacggtattaaacttggaagtgaaattcgaaagtacgatcctattgggaatatcatctttgttacaagtcatagtgaactcacttacctaacatttgtctataaggtatctgcaatggattttatttttaaagatgatcctaatcaactaaaaacgcgaataatagattgcattgaaactgctcatacacgtttaaaattactttcaaaagaaagcaatgttgaaacaattgaattaaagcgtggtagcaattcaatatatgtacaatatgatgatgtcatgttctttgaatcgtctacaaaatcccatcgtttaattgcacatcttgataaccgtcagattgaattctacggaaatcttaaagaattagcacaactcgatgatcgttttttcagatgtcacaatagttttgttgtaaatcgccataatatcgattcagtcgattctaaagaacgaattgtaactttcagaaatggtgagcattgctatgcctctgtacgtaatgttaaaaagatataatattaaaaccccttcattttaatatctgaaggggtttcttaatctcttttttaaagttcttcaataacttcttctaaacttggaatactttcaatagcgccatatttagtagttacttttgcagctactaaattactaaattttaaaatttcttctcctttttctttaaatagagaagtaatgtctgttaattctgtatttaaaattctattaatgactgcaccaataaacgcgtctccggcaccagtagtgtcaacagcttcaactttatacccttgatgatgaataattgtcccatcttttaaataggctgttgctcctttgtctccttgtgtatagataactacttcaacattccctttaaataaagattgaatcgctttatgttcatcacttattccagtaacaaattcaatttcttcatctaaaattttaatgatatttgcttttggaagaaatgactgaatagtcgctttacacgcttctgcgctatcccataatggtaatctaacatttggatcaaacactatcatcccatgagccgcttcaaatttttcaatcatagcaagatgtgcatttttcatatcacattcaattaaatcaacagaacaaaaatgtagaacatcttgattagaaatattgatttcatctaaattcgaagtatgtataataaagcatgtcagctgatgatttacgataaaaagaaaaatctcgttccccattttcttttaaactaacgaaagcgagtgcagtattagctgcatgtgttcgtttaatatatgttgtaccaacgcctattttctctaacgtctctacgataatatctccaaaagcgtcattacctaattgtgtaaccatttctgtcctactacctaattttttagccacacttgccacattagcaggtgccccgccaacttgtcgactgaactgcgttacatctttaagttcaatatttgttctatttggaataaaatcgattaatgcttcaccaatagcatataacttcctcatttatttttctctccctaagtcatatttagtaaattttaaataaacttgacctgtttctgtagatgtgcgaattgctgtagcattttcatcaggaaaaattcttgacgttaagacacactctccatcattacaaaaaatttcaatacttgacgtatccacaaaaatgtgtaattgctttaatggcgaatctaaatatgtagatcttgtcacaccttcaacattactaggtaatgcaccactttctgatcgatctaatgtaatcttttgctccctagtattataagaaattaatgttgaatttaacttagatgctcttaattcaaaatatatttctgttgcttcattttctaaaatatcaataataagctcatattgcgtaccttcgtaaggatgaagtgttgtattatatttgttagcataacctaatgctgtttctttattttgacgtaacgtctctaacgctttcaaaggacgttggcgtaaccgtccttcttcgattgttaactctctaggtatcgttaaacaatgtgcccaatcttcttcatctgtaggatagtgagtatctggtaatcccatccacccaattaaaatacgcttaccatattcatctataaacgtttgtggcgcataaaaatcaaaaccattatcaagttctataaatgtatcatgtttgaattctaatgtatcgaaatttaaatgaccgattagatatccagattgataaatatttctatatttttcttcttttgcatcaataccttgaggactaaaaataatgacatcttgtccatttaaactaaaatagtctggacattcccacatatagccaaaatcttctagttcggttgtaattcctccaatatattcccattggtcaatctgtcgatgtatcattttgtacaaaagtaaacgtcctaattcttgttgagtttggacacctaatattgcataatattcttcatgatgtttaaatacttttggatctctaaaatgacttgtatatccttcaggttgatgagcaatcacaggcttatttaatttttcgattgaaccatcttgttttacttttgcaatcatttgactcgaatatcttttccattctttatctcgatgattacctgtatacatgtaatataagtttccttcaaattcaaaagcacttccactatataccccatgactatcataaatcgtatcaggctttaatataggaccatttggttcaaatgtcactaaatctttactagtataattaaaccaatatttcagtccatgcacagcacccaatggaaaccactggtgagatacatagtatgttccgttataaaacatcaatccattaggatcatttaataaacctgtttcaggttgaatatgaaagtgttgacgataacttgattgttctattcgatgctttaacgcttctaattcatctttgttcacatcttcaatacgacgatagcgttgttctcttgaccactcagtcatattagtcctcctaaatcattagtattaattttatcacttaatatcgtaacggtaattagtcttaagactttacaatctataatttaaaaagcgggaaattgtacttttgatactcccgcaaactttgcaatatctgatatgtttttcaatagactaatcatctaaattaatattaatataatattaattttatcatatcgtgattatcttcaaatactgttttactaatgaaactttaacattttaaatatatatcaataccttttatgtaatttatttaattccccataaaaatatgccttttcaccatgcacaagttgatctaaacctgtcatatcttcttcaacggtcgtagcaagggacataaaaattgataatgtctttccaataataaaagttataataatcgagtaaacgactactactacaactgcaatacattgtatccatatagtatgtaaatgaccagtatagattaatccatctaatatatctttattaactttatgtgattgaaatacaccagtcaatattgcaccaatcacacccccaacaccatgaataccaaaggcatcaagtgtatcattatatcttaatttttcttttatagaattgaccacaaaataacatgctataccaccaatcatagagataatgtatgcacttaagtagtttacaaatccagctgctggtgtaatggttacgagtcctgacagtacacctgataataaaccaagtaagcttaactttttattagaaaagtattcaagaatcaaccagctaaatgctcctccgcttgcagcgatgatagtatttacaaatgatatcactgctatatcatttaaagtaaacgcacttcctgtattaaaaccgtaccatcctatccaaacaaaaataccacctataagtgtaataagtaaattattcggctgtagtttctctactttttttccgtgacctatcattattgctaatactaatcctgatactcctgatgtaatatgtaccacagtacctccagcataatctaaagcctcaagttgttgaatccaaccaccgccccatacccaatgggctacaggactgtaaatcataattacccatataaatataaaaatggtaaaaggaataaatctcattcgctcagcaattgaacctgataaaatggaaaccgcaatggtacaaaacatcatctgaaataacataaataaggcaaacggaatatgtggactaaattgaacattcgtattaaatcctacatgttgcaaaccaataaaatcaaaattacctatccaatcatttccatgaccaaaactaagagaaaacccaatgaccacccatgtaaacgtaacaataatgatagcggccatactttgcatcactgtatttaaaacatttttagattgaactaagcctccataaaataaactcaatcccggtgtcattaaccaaactaataaaatacacagaaataaaaaaattgtgtcatccatcttcatttttaccacttccttaaaaaacatcatattaatagtttttaagaatagcaaaaacacgtaagattaaatgacacaatttgtcatattacattacatttataaagaaaaacttaagctttttgaactgtgattgtccatgaagcatcatcaagttgttcatagtttgttacaggatacccctgttctgctgcccagtttggaattgcttcagttgcttgagtgcaatcaaagtctatttttaattcgtcaccattttttaatgtttccattttcttttgtgcttcaataagtggaaatggacataccattccaacagttcctaattcgtataacatattcagtcctccaataattaagttgtttgagtttgtttagatatttgagtagattgagctgtttgtttttgaatttgtttcattggtcttacgaaaataaagtaactcataaaccatgtacctaatatcatcgatgctaaagcaatccaaccttgccaacttagtgttgcagtcgccactaatccattaccaatggaacaaccgccagcaactgaagcaccaaatcccatgcatataccaccaatagcactatttctaatagtaattttatctggtaaacgccatttaaattcttttgctcctctagcagcaatatatgatccaataaatatacctaatactaaaaaaacgccccaatcgataaattttaaatctccactcattaagaattgaacaatatgtgctgatggagtagtgatacctaatccatcttcacgtccagtagaataactcataggccatgctaataaagcaatcaatcctacaataattccagctacaaatggatgatagcgcttttcaaataaataatgtcgtattcctgaatatctttgctttaatttgggtacagcaattttgggttttggtttacgtaatgtacggataactaagaataatgttacacctgttaatataataactaatatccaacttggtatgcctgtcgtttgtgacatactagcatttacattcgttggtttattaattttattcattaaaggtaatagaattccagctttggtaattgttgctgataaagcatacataattaaagcaacccaactaccaattaatccttccccagctcgataccatgtgccagttgcacatccgccagctaatactataccaataccaaacacaaatgaaccaataatcgtacccattactggaaatgtttgataagaaactgttaatacatcaaaaccagttaaaactagtaagcctatactttgtactgtaattgccactaacaaagcataaaacattttattatttttttgaacatacatatctctaaatccgccagtaagacaaaaacgtgtacgttgcataacaaaacctaataataggccaacgattaatccactaataatcatccaaatcaaataaaacaccctttcccgattgatttactaaggtattataatggattaactaacctatttcaatattttccattgaattaatatatttataaaaaaagctataatgcaaatgcattgtagctttaaaaaataatttaatattaatttgaagagtttttcataaagaataatagtgattgtaattcgatacctaaatcgatatgatgaacttgaacatcatttggcacatcaattctagcaggagtaaagtttaagataccttttacatctgccttaataagtcgatctgaaacagattgtgccacacttcctggtgtagtaagaatcactacattaatattctgtttttgaagttcagatgaaatatcatcaatatgctttactgtcacttttccaactgttgtaccaacaatatctttatcaatatcaaatgcagctgtaattgtcatttcatcatgtattgaaaaattgtaagtaagtaatgcacgtcctaaattccctacgccaacaatagcaatgtgaatattattactatcgctaatctccgttttaaagaattctaaaagactctcaacgttatagccatatcctttcttacctaactcaccaaaataagaaaaatctcttcttatcgtagctgattcaatatctaaagcctcactaattgttttagaactcacgcgatcaatacctttaatttttaatgaattaacaaatcgataatataaaggtaaacgttttaatgtagcgcgaggtatttttgattgattttgaggcatatgcaatgtccccctttttgtttgaactttttaatctatatattcaaactaactagagtgcaattagttattttagtgaaatatatataatgcctattatggatactgcaatattataccgtaacctatttcaaaaataaatatcttagtttcctaagcataccttatattgtaaaatgatataataatgtcaaatttaaagttaaataaatgtgattgttacatagatagaaaggtgaaacttgaatgatacttttacaattaaatgatatttcaaaatcgtttgatggtgaagatatatttaatcatgttaattttgaagttaaaactggagaacgtattggcgtagtaggaagaaatggcgctggaaaatcaacgttaatgaagattattgcaggtgttgaagattatgatagtggccatatttcaaaaatcaagaatttacgtattggttatttaactcaacaaatgacacttgattcttctcttactgtaattgaagaaatgtcaaaaccatttgaacatattaagcatatggaaacgcttattaatgatgaaactgattggttagccgctcacgttgatagttatgattcagaagattataaacaacatatggagcgttatgaatcattatctaatcaatttgaacaacttgaaggttatcaatatgaaagtaaaattaaaacagtattgcatggtttaaactttactgaagaagaatttgataaacccattaatgattttagtggtggacaaaaaacacgtttatctttagcacaaatgcttttaagtgagccagatttattactattagatgaacctacaaaccacctcgacttggaaacaactaagtggttagaagattatttgaaatattttaaaggtgccatcattattattagtcatgacagatacttcttagataaaattgtaactcaaatatatgacgttgctttaggaaatgtgaagcgttacgtaggtaattatgagcaatttattactcaacgtgataaatactatgaattaagaatgcaagaatatgaaaaacaacaagaagaaattaaacgtcttgaaactttcgtggaaaaaaatattactcgggcttcaacaagcggtatggctaaaagtcgtcgaaaaacattagaaaaaatggaacgtatcgataagccaatgatggatgctaaaagtgctaatatccagtttgggtttgatagaaatactggcaatgatgtgatgcatatccgtaatctagaagtaggttatcaatcccctatcactgctcctattaatattgaagttacaaaaggagaccatattgctattattgggcctaatggagttggaaagactacccttatcaaaacaattgcaaatcgtcaaaaagcattaggtggagaaattacttatggtgctaatttaaacataggatattacgatcaaaaacaagcagaattcaaatctaataaaacaatattagattatgtttgggatcaatatcctatgatgaatgaaaaagatgtccgcgctgttttaggacgatttttattcgttcaagatgacgtcaaaaaagttattaatgatttatcagggggcgaaaaagcacgtttgcaattagctttacttatgttacaacgtgataacgttttgatactcgatgaacctactaaccatcttgatatagattctaaagaaatgttagaacaagcgttaaaagattttgaaggtacaattttatttgtttcccatgatcgatattttattaatcaactagcaaataaagtatttgatttaaataaagatggcggtcaactgtatttaggtgactatcaatattttattgagaaaacagaagaagcttctgcgttaaaggaatttgaagcggaaaacaataaagatgaaacgcttgatttagaagacaccgattcgtcaacgactaatacatatgcttctcaaaaacaatataagagagaattacgaaaaattgagcgtcaaattgagcaatgtgaagaacaaatcgaaaaatatgaagaacacattactcaaattgatcaacaattgactcagcctgatatttttaatgatcctattaaggcaaatgaacttgctgagcagaaattaagtatcgaacaacaattagagaatgttatggctgaatgggaagaattacaagaaaaaatttaatacatctaagaaaactagtaaaagtatcaaatttttactagttttttatttatttcattcacaaatttataaacaactaaaatactgatatctcagttatcaacgaacttatcctagttatccacaacgcgaacgataataattcacataacttttacacaacatttaaactatattcacatctttgccccctttttatccacaagatattaactatttgttgataagtacacacgttctctattgacatatatcataagtcaatatattaacctaattaaataaaaaagtaattgaaacttatttgattttaagttcaattactttttactttattattcaactgttacatcttcaatatctatattattttttccatttaaatctaaagatgaagttacaccagctttatagtaataatatccagcagcaccaatcatagcagcattatctgtacataactttgaattaggtattgaaagtttaatgttattttctttacacaaatgatttaatcgttctcttaatcctttgttactagctactccgccagctacaataaggtgttcaacatgataagctttacaagcattaatagcctttgtacttaatacatcgacaacactattttggaaactggtagcaacatcttctttttttatgtcttcatttttttgtcgttgattgtgtaacttattaatcactgcactttttaatccactaaaactaaaatcataactatctttttcaagccatactctaggaaaatggtatgtgtcctttccttccaaagcaagtgcatctatagctgggcctcctggatatgataaaccaattgttcttgctaccttatcataagcctctcctacagcatcatctcgtgtttcaccaattacttcaaaatttaaatgtgatttcatataaacgagttctgtatgtccacccgaaacaattaatgctattaaaggaaagactaacggttcttcaagatgattagcataaatatgtcctgcaatatgatgaataggaatgactggcttattataagcaaatgctaaagcttttgctgcattaattcctattagaagtgcccctattaatccaggtccttgtgtaacagctatggcatcgatatcttccatagtaacattagctgaagataacgcttcatcaattgtagtcgtaattccctctacatgatgtctacttgcaacttcagggactactcccccaaaacgtttatgactttctatttgactaagtacaatattagataaaatcgtatttccattttttataacacttacacttgtttcgtcacagcttgtttcaaccgctaatattaatatgtctctattcatttaaattcacccacatcactaatgcatcctcgccttctccatagtaattttttcttttaccgccatattgaaaccctaattttttatatacatgttgagctatcacattcgtaattctcacttctaaactcatcacatcacaagtatgcctagcatagtccatcacataattaagtaatagctgacctaatccatagtctctgaatgattctttgattgctattgttgtaatttgagcttgatctattactatccataatcctaaatatccaataatttcttcttgaaaaataacaacaaagtattttgcgaagttattttcatttagttcatggtaaaatgcatcaatggtccatgaactatcgttgaagctttctctctcaatatcgaaaacacttggtacatcatcgacttgcatcgctctaatggttaactgttcttctgttggtttaaccaattacgttccgcctctgacaattttatataatttggtacaaacgtatgaatgttctcaggttgatgaatcaagtgtttcatgacagttgcattaggcagtttagcttcaatatctccaagtagtaattcagataatttttccgtgtcctctcctacaaacacataaggttgatttaaatcattgagttttttatgcaacgcttctaaagaaatatattggtctttttcaattgtatttaattgattgttttcatattgatataatcctgtatataccgcttcgcgacgagcatcaaatattggtacgataattcttttatcattcgtatctatagtagccgctaatgcttttaacgatgatacaccatataatttagtattcaaagcataggctaatgttttcgctacagtaacgcctattctcactcctgtataagagccaggcccttttgcaataacaatcccatctaattcttgtttttttaaattcgattcattaaataaggattgaatactaggcataagttggctcgaatgatcttttttactatttgttgtttttattgctaaaacctcatcatcgttcatcaaagcaattgacatgggttgatttgaagtatcaattaacagtaagttcattgtctatctcttcctttattttagtataatgatagccttttgctgctatattaatttgtcgttgattttcatttatagtcgtaatattaatcactaaatactcttccggaaggaactcctgtataaattgactccattcaattattgtaacagcgtcatcttcaaagtattcattaaatcctaaatcttcatctgaatcttctaagcgataacaatccatatgatgaagttttaactccttacctttgtatgattttatgatattaaacgtaggagaattaatattacgctttactcctagatatttacctataaattgagtcaacgttgttttaccagcacctaaatctccattcaataaaatgacatcttttgaaccaacatgcttcattaaaattttagcaaaatgttccatctcatctaaatttttgataggtatcatgtattgttctctctcctcatgtttattttacacttcgttatttcatctaaatttaacttaataattgtaacaaactttactaaaaatttctcattaataaaatataaatcattcctctaaattgttagaaaattctaaaaagagtattgactttaatatctgtttagtgtaaattaaatttatcaaatttttatacaattctaactattcaaataatcacccattcaagaaaggagtataataccatgcaatcatttacatattcactgtcaccactagaaaatttaattattttattatactcttcagggctggaactttagtagcttaatttactaaatgtttaagtcctatttctcattgaatgggacttaaaaacgtcccaactttattggggcgtttttttattttaataattagtaatttatgggggaatgaataaatgagaagtgacatgataaaaaaaggtgatcatcaagcaccagcaagaagcctattacacgcgacaggagcacttaaaagtcctactgacatgaataagccttttgtagcaatttgtaattcatatatcgatatcgttcctggacatgttcatttaagagaattagcagatattgcaaaagaagcgattcgtgaagcaggtgcaattccttttgaatttaatacaattggtgtcgatgatggaatagcaatgggacatattggtatgaggtattccttaccgtcacgtgaaattattgcagatgcggctgaaactgttatcaatgctcattggtttgatggtgtattttatattcctaactgtgacaaaattacacctggaatgttattagcagctgttagaacgaatgtccctgctatcttttgttcaggtggtccaatgaaagctggtttatctgctcaaggaaaagctttaactttatcgtctatgttcgaagcagtcggagcttttaaagaaggttcaattactaaagaagaatttttagatatggaacaaaatgcttgtccaacatgtggatcatgtgcaggaatgttcacagcaaattctatgaattgtttaatggaagtcttaggattagcacttccctacaacggtacagctttagcagtaagcgatcaacgtcgtgaaatgattagacaagcagcatttcaattggtagaaaatataaaaaatgacattaaacctcgtgatattgttacgaaagaagcaattgatgatgcatttgctttagatatggcaatgggtggttcaacaaatactgtacttcatacattagcaattgctaatgaagctggaattgaatatgacttagaaagaattaatgaaattgctaaaaaaacgccttatttatctaagattgcaccaagttcttcttattctatgcacgatgttcatgaagctggcggatgtccagcaatcattaatgaattaatgaaaaaagaaggaaccctacatccagatcgactaacagttactggtaaaacattaagagaaaataaccaaggtaaagagattaaaaatttcgatgttattcattctttagatgctccatatgataaagaaggcggattgtccgtcttattcggtaatattgctcctaaaggtgcagtaattaaagttggtggtgttgatccttcaattaaagtatttaaaggaaaagcaatttgctttgattcacacgatgcagctgtagaagcaattgataataaaacagttcgtgaaggtcacgtagttgtcattcgatatgaaggacctaaaggaggtccgggtatgccagaaatgttagctcctacatcatctatcgtcggaagaggtttaggaaaagatgttgctttaattacggatggtcgtttttctggagccactcgtggtatcgctgtaggtcatatttcaccagaagcagcctcaggaggtcctattggtctgattagagatggtgatgaaattactattgacttagtaaatcgaactttagacgttaatcagcctcaagaagaattgtataaacgtaaagaagaacttgagccttttaaagctaaagtaaaaacaggttatcttgcaagatacactgctttagtaaccagtgcaaatacgggtggtattatgcaagtcccagaaaatcttatttaaatttaaggagcgataaatatgtcaaaaacaaaggaaagtaataaacaaactgaaacacttacaactcgaagcggttctgacttattagtagaagcacttgtacacgaagatgttgatttcatttttggatatccaggtggcgcagttttaccattatacgatacattttatgatgaaaaaattaaacatattcttgcacgtcatgaacaaggtgctacccatgccgctgaaggatacgcacgtgtttcaggcaaaccaggtgtcgtcgtcgtaacaagtggtcctggagctacaaatgctatcactggtattactgatgcttattgtgattctctacccttagtcgtatttaccggacaagtggcaacccctggtattggtaaagatgcattccaagaagctgatttattatcaatgacaacgccaattacaaaagctaattaccaagttaaacatgtagatgatatccctagaattgttcacgaagcattttatttagcaaatactggacgtaaaggacctgtagtcattgatttcccaaaagatatgggtgttttaacttcttctgctccacttgaagaagaggttcatttaccttcatatcaagtaactgaaaatccaaataaagaagatattcaacaactttctcaatatttaaatcatgcaaaaaaacctgtcgttttagctggagcaggtatcaatcactcaaaatcaaatgctttattaactgaatttgttactcaacatcaaattcctgttgttacaactttattaggtctaggtgctatttcatatgaaaatccccttttccttggtatgggcggtatgcatggctcttatgcaagtaacatggcactcactgaatgtgacttactcattaatttaggtagtcgatttgatgatcgtttggctagtaatcctaacgaattcgcacccaacgctaaagtagtacacattgatattgatgaatcagaaattaataaagtgattcctacaacactcggaattgttgcagattgtaaaaaagtattagaagcattagttactgaacatcaaagtcatgctacatacaaagaatgggtagaccattgtttagataataaatcaaaacatccatttaaatacaaagaagctaatgatacattttgtcgtccacaagaagccattgaatatattggtaaaatcacaaatggtgaagccatcgtcactacagatgtaggtcaacatcaaatgtggtcagcacaattttatccttttaaacatcatagtcaatgggttacaagtggtggattaggaacaatgggattcggtattccttcagcaattggtgcacaactcgcagctccagataaaacagttgtttgttttgtaggtgatggtggattccaaatgaccaatcaagaaatggcgttattacctgaatatcacctaaatgtaaaaattattttaattaacaatggtacattaggaatggtaaaacaatggcaagataaattctttaatcaacgtttttcacattctgtttttaatgatcaaccagattttattaaaatggctgaagcttacggtgttaaaagcttcttaatcgatcatcctaataaattaaaagcgcaattagatgaagcttttaattatgaaggtcctgctttaattgaagtaagaatttctccagcggaacctgtaaaccctatgattcctagtggtaaagctaatcatgaaatggagggtctagaatgaaccgaactttaaaattaaaagtagctgaccaagtcagtacgttaaatcgaatcacaagtgcttttgtaagattacagtacaatatcaatgaattatatgtaaaacctgctagtgaagatggcatatctgatatgacaatcaaagttcatattgaggatgaagatgtatatcgaattttaattactaaattaaaaaaacaagtcagtgttattaatattgaagatgtgaatgattaattcttagatgatgcgctagcattttacatcaattatcatatttaatgtctaacatcatgaagttaattattaccttttcaatattcggaattttttaaattttttaactaatggaggaaagtattatgacaaaagtttattatgatcaatcagtagaaaaagatgcactacaaggtaaaaaaatcgctattatcggttacggttctcaaggccatgcacatgctcaaaaccttaaagataacggttacgacgtaagagttggtattcgtccaggtaattcatttaataaagctaaagaagatggattagatgtttatccagtggctgaagcagttaaacaagcagacgttattatggtattacttcctgatgaaattcaaggtaatgtatataaaaatgaaattgctccaaatttagaagctggtaatgcattagcttttgcacatggatttaatattcattttaacgtcatcgaaccacctaaagatgtagatgtcttcttagtagcacctaaaggtcctggtcatctagtaagacgtacatttgttgaaggttcagctgtgccagcattatttggtgttcaacaagatgctacaggtcatgcacgtgacattgctttaagttatgcaaaaggtattggtgctacacgtgctggtgttattgaaacaacatttaaagaggaaactgaaactgacttattcggtgaacaagctgtactttgtgggggaattcataaactgattcaaagtggtttcgagacattagtggaagctggatatcaaaaagaattagcatattttgaagtactacatgaaatgaaacttatcgttgatttaatgtatgaaggcggtatggaaaatgtacgttattcaatttcaaatactgctgaatttggtgactacgtatctggtccacgtgtcattactccagatgttaaagacaatatgaaagaagtacttaaagatattcaaaatggtaatttcgctaatcgctttgttaaagataacgaaaatggatttaaagaattttatgaattgcgtgaacaacaacacggtcatgaaattgaagcagtgggtcgtgaactaagaaaaatgatgccattcattaaatctaaaagcattcaaaaataaaatgtaaggagatgttaaaaatggaaagccatattcaaatatttgatacaacgttaagagatggagagcaaacacctggtgtgaatttttcatttgatgaacgtttaagtattgctaagcaacttgaaaaatggggagtcgatgttattgaagcaggcttccccgcttcaagtactggaagctttaaatcagtagaagcaatctctaaagcattaactaccactgcagtgtgtggattagcaagatgtaaaaaatctgatattgatgcagtatatgaagcaacaaaatgtgctactaaaccacgtgttcatgtatttattgctacttcccctatccatttagagcataagctaaaaatgactcaagaagaagtcttagaatcaattaaagaacatgtcagttatgctaaatcattattcgatgtagtacaattctcaccagaagatgcatcaagaacagatcaagcattccttataaaatctgttcaaacagctgttgatgctggagctacaataatcaatattccagatactgttggatatagctatccaagtgaatatggtgccatttttaaatctcttattacaaatgttaaatcagaaaaagaaattatttatagtgcacattgtcatgatgatttgggtatggcagtagcaaatagcttagctgcaattgaaaatggtgcgaaacgcattgaaggtactgtaaatggtattggtgaacgtgcaggtaatactgcattagaagaaattgcattagcactatacgttcgcaaagatcattatggtattgaaacaaaattaaaattagagcaaactaaattgacttcagaattaatttctagatatgcaggcattcgagttccaagaaataaagcaattgttggtcaaaatgctttcagtcatgaatcaggtattcatcaagatggtgttcttaaaaatcctgaaacgtacgaaatcatgacgcctcaacttgttggaataagtaaaaatgaattacctttaggcaaactttctggtaaacatgcttttgctgaaaaacttaaaacgttaggttatgacattgaacctaaacaacaaatcgagttattcaaacaatttaaagcagtagcagataagaaaaaatcagtatctgatcgagatattcatgcgatgattcaaggttctgaacatgaacaaaatgcaatttatcaagtagaaactttacaattacaatacgtttcaaatggtctacaaagtgctgttgttgtcattaaagataaaaaaggtcatatttatcaagactcaagcattggtacaggatcaattgttgcaatttacaatgctgttgatcgtatttttaaaaaggatagtgaactaatcgattatagaattgattcagttactgaaggtacagatgcacaagctgaggttcatgttgagcttgttattgaaaatcaacatgttaatggcataggtatcgatcatgatatacttcaagcttcttgtaaagcatatgtggaagctcatgctaaatatattgcccaagatttagagaaagtaggtaataaataatgacatataaaattgttgctttacccggagatggcatcggtcctgaaattttaaatggaagtttggaactattagaaataataagtaagaaatacaatttcacctataatttaaaaagttatgattttggaggagccgccattgatacacatggcactccccttcctaatgaaacactctctgcctgtcaagaagcagatgcgattttattaggagcagttggaggaccaaaatggacagatcctaataatcgtccagaacaaggattattagcgttacgtaaaaagttaggcttatttgctaatattcgtcctactaaagtgactgaaggtaccagtcaattttcacctttaaaagaagcgcgtgttaaacatacagacctagttatagttcgtgaattaacgagtggcatttattttggtgaacctagacatattaatcattctgaagcattagattctcttatttatactaaagctgaaatagaacgtattgctaaagttgcatttgaattagcacgtactcgtaataaaaaagtaacttctgtagataaagagaatgtccttgcttcaagtaaactttggagaaaaactgttactgaagtaagcaagtcttatccggacatcgaattaaatcatttactcgttgatgcgtgtagtatgcatttgattactcatccttcacaattcgacgtcattgttactgaaaatctctttggtgatattttaagtgatgaagcttcagtaatacctggttcacttggtttatccccttcggcaagttttagtgaacatggtactagactttatgaacctattcatggctcagcgcctgacattgctaatcaaaatcttgctaatccatttggaatggtattgtcactagcaatgtgtttaagagaaagtttaaatcaaagtgtagcagcagaagaattagaagatgctgtatatcatttaattaaaattggtaaaacaacaaaagaccttggaggacactataaaacttcagaaatctttgagttacttaaaaaaagttatcaataaagggaggtacataaataatggctcaaacattatttgataaagtttggaataaacatgtcttaactggtaaagaaggcgaacctcaactcttatacatagatttgcatcttatacatgaagtgacctctcctcaagcttttgaaggattaagacttcaaaaaagacaacttagacgtccagatttaacctttgcaactcttgatcataatgttcctacaatcgatatatttaatattagagatgaaattgctaataaacagattacaaccttacagaaaaatgccaaagattttggggtacatatttttgatatgggttccgatgagcagggtatcgttcatatggtaggccctgaaactggattaacacaaccaggtaagacaatcgtatgtggtgactcacatacagcaactcacggggcatttggtgctattgcttttggcattggaacaagtgaagtagaacatgtttttgcaactcaaacattatggcaaacaaaacctaaaaatcttaaaattgaagtttctggtaaattacaacctggtgtgtatgctaaagatattattttacatttaatcaatcaatatggtgtagatttcggaacaggctatgcacttgagtttactggagaaacaattcaatcactatccatggagggtcgaatgacaatttgtaacatggccattgaaggtggagctaaatacggtattattcaaccagatgaaactacatttgaatatatcaaaggtcgtccatatgcacaaaattttaatcaatctattggagaatggcagaaactatattcagatgaaaacgctcattttgacaaagtgattacacttgatgtaacaaatttagaacctcaagtgacatggggcacaaatccagagatgggtgtaaattttagttctccattcccagaaattcaaaatattaatgatgaacgggcatacaactatatgggactgaaacctggtcaaaaagcagaagatatcgatttaggttatgtctttttaggttcatgtactaatgctcgcctatcagatttgatagaagcaagccatatcgtaaaaggaaaaaaagtacatcctaaaattactgctattgttgttcctggctcacgtacagtaaaaaaagaagcagaatctcttggattagacaaagtatttaaagaagcaggctttgaatggagagaacctggatgttccatgtgcttaggaatgaatcctgaccaagtaccagaaggtgtccattgtgcctcaacaagtaatcgaaattttgagggtcggcaaggtaaaggtgcacgtacacatcttgtttctccagccatggcagcagccgcagcaataaatggtaaattcgttgacgtaagaaaggtggttgtataagtaatggatattcagcctatcacccaatacacaggtaaagtagtccctttgtttaacgataatattgatacagatcaaattattccaaaagttcatcttaaacgaattactaaaactggttttggaccctttgcttttgatgaatggcgttatttacctgatggatcagataacccagattttaatctaaacaaaccaaaatataaaggtgcttcaattcttattactggagacaactttggttgtggttcaagtcgtgaacatgctgcttgggctttaaaagattttggctttaatattattattgctggtggttttagcgatatcttctatatgaattgtacaaaaaatggaatgttacctattgttttaaatgaacaatctagaaaatatctagccaatcaaaataatataacagttgatttaccaaatcaaactgtgtccgcaaataatcaatctttccactttgatatagatgaaacttggaaagataaacttataaatggattagatgatattgctattacattaaaatatgaagaattaatagagaaatatgagaaaacaatgtaaggatgataacaaatggttttaaagacaacggtaacagctactgatgtagacgaagcttatttacgtataaaagatgtggtgaaagaaacaccattacaatatgatcattatctttcacaaaaatataattgtaatgtttatttaaaaagagaagacttgcaatgggtacgctcatttaaattgcgtggtgcttataacgctatttcagtattagacacacaagctaaatcaaaaggtattacttgcgcaagcgctggtaatcatgcccaaggagtagcttatactgctaaagcattaaatttaaaagctgttatctttatgccagtgacaactcctcttcaaaaagtaaatcaagttaaattctttggtgcagaaaatgtagaaatcgttctaactggtgatacatttgatgattgtttaaaagaagctttagtttatacagatgagcatcatatgacatttattgatccattcaacaatatttatactatcgctggtcaagggacattagcaaaagaaattttattagaagcaaaaaaagaaatgattcaatttgattatctctttgcagctattggaggcggaggtctaatatccggtgtaagtacatatatgcatgaacatagtccacatacacaaatcattggcgtcgaacctgccggagcaagtagtatgtatgaatctgtagtagttcaaaataaagttgtaactttagaacatatagataaatttgttgatggcgcttcagtagcccgtgttggtgatattacctttaatattgtcaaacaatacgtcaacgactacttacaaattgatgaagatgcagtatgttctacaattttagatatgtactctaaacaagcaatagtagcagaaccagcaggtgcattaagtgtatcagctcttgaattttataaagacaatattataggaaaaactgtagtatgcgtagtcagtggtggaaataatgatattaatcgtatgaaagaaattgaagaacgttcacttttatatgaagaaatgaaacattatttcattttaaacttccctcaacgtccaggagctttaaaagaatttgttaatgatgttttaggtcctcaagatgatattactaaatttgaatatctaaaaaaagcttctcaaaatactggtactgttattattggcattcagttaaataatcatcaagatttagaacaattaaaacataatgtcgatgaatttgatccatcaaatatttatattaatgaaaataaaatgttgtattcattattaatttgagataatattaaaaacttcttcagtatattattgaagaagttttattatttttttagtttaatacttccacttctcaattcattagctccaaacactttctataaatttcgacataaaaaaaagagacctcacagtctcaaaatcgggtcatcgcatccatacaatgatttgcctggcaacgtcctactctagcggaacgtcagtccaactaccatcggcgctaaggagcttaacttctgtgttcggcatgggaacaggtgtgacctccttgccattgtcaccagacaagtgaatgattatacattcaaaactagatagtaagtaaagatttgcgtcgcaaaacttgaaaaaattgattaagtcttcgatcgattagtattcgtcagctccacgtgtcaccacgcttccacctcgatcaaactctccataaaaatttatgatgtttgattagctcataatactaaatagtgtttgtaacatttaagttactttattggaattaacgttgacatattgtcattcagttttcaatgttcatttgaaatttgtaatggagcgggtgatgggaatcgaacccacaacatcagcttggaaggctgaggttttgccattaaactacacccgcagtatataataattgaaattgatttggtgcggccgagaggacttgaacctccacgggatttctcccactaggccctcaacctagcgcgtctgccattccgccacgaccgctggcaaaacgcaataatttattaattatcgagaacattatttattgtaaatgatttgtaataaaaagtcaataagtttttaatattattttaaataaatttactattttttaatatttacctcattcattaatacaacgataactataatacatacttttttaacataagtcaatagtttttattaaaaaatttaaaaacctacaatattgtaggtttttaaaggacattgttatattagtaatatcttatttgttcatatttaaatttatttataaatacatctttaatttcaatttacttccacatttaccacatctcattttatcaatattaacttttctaatccttagatacgtagtcttacatttacaacattgatatatataatttgctctttcttcatagctttgaatcggctgacaaaatcttggagcttgaactttattgcttaacattttaaagtcatggtccttgtgttgataaccttttccggataaatgtaaatgataatgacatagttcatgctttatgatatttattaaagcatcttttccaaaacaagaaaattgcttcggattaatctcaatatgatgtgtagataatacatatcgtccgcctgttgttcgtaatcgagaattaaaataagctttatgtttaaaaggttggttaaaatgatcaagcgaagttgtttccactaacttttgaagcattttattattcattaggattaatcatagtcaatgatactttttctttatttttatcaatatttaaaatccaaacatcaactatatctcctacactaataatatccataggatttttaacatatttctttgataattttgaaatgtgaactaaaccatcttgtttaacacctatatctacaaatgctccaaaatctactacatttctaactgttccacttaacttcatacctttagacaagtcttcgattgataatatgtcagattttaactgtggagtttcgtaactatcacgaggatcacgatttggcgttttaagagattttacaatatcttctagtgttggtttgcctattccaatttcatttgatttttcttcaatattaatatcactaagtgtttgtttaagtttatctgaacctaaatcatcaattgatagctgtaaactttctaaaaactgatatgttgcttgataactttctggatgaatagatgtattatctaatggttctttaccattaacaattcttaaaaacccgatactttgttcaaacgttttactacctaaacgttttactttgcttatttcagaatgatgctttatggatccattttcttcacgataatcaattatattttgagcaatggtacttgataatcccgaaacatattgcagtaaagattttgaagcggtatttacatctacacctacttggttaactgcagtttctacgacaaatgtgagcgcttgttcaagttctttttggtttacatcatgttgatactgtcctactccaatagatttaggatcaatttttactaattcactaagtggatcttgcacacgtctaccaatagacactgcacttcgttcttcaacttgaaactctggaaattcatttcttgctatttcagaggcagaatatacagaagcccctgcttcatttacaataataaattgagcatttagttgatatttttttattacatttgctacaaattgttctgtttcacgacttgctgtaccattaccaattgcaattaattcaacattattttcagttatcattctaactaattctttttctgccaattctattttagattttggaggatgaggatatataacacttttagcaataaatgttccaaaaggattgataacagctaatttgcatccagttctaaatgctggatcgatacctaaaatttgtttacctttcataggaggctgtaataataaatgttttaaattttcactaaacacttctatagcgtgatgctctgctttttcagttaaatcatttcgaatttctctttcaattgaaggcatgattaaacgttttaaactgtctttaattgcagactcaatatattcaactagttgatgagctttttttacttcttgcgattgtataaatgtttctattgaagtagtatcaaattcaattttaattgacaatactttttctttttctccacgattcattgctaaaattcggtgattagctattctttttataggctcagaataatcataatacatactaaatatctctttttcatcatttgcttgttttttctttgttgtcacaatctttccttgataataaacgtctttaagtaaacgttgtcgatacttaggattatccgaaatacgttcagcaataatatcttgagcaccttgaattgcctcatcaactgttttaacttcttcacttaaatattttctagcttcttcatgtacattcatactttgtccttctattaaaaagtgagctaatggtgctaatccttttcgttttgcttcagttgctctagttttctttttttgtttaaaaggacgatataaatcttctacacgttgtaattttgtttgctgaagaatgtcttgctttaattcattagtaagtaaaccttgttgttcaatattatgtataacttcttctttacgtttttgaagatgcgctacatattgatattcatcagatatttgtttaatttgaacttcatctaaaccaccagttgcttcttttcgatatcttgcaataaaaggtactgtgttattttcctctaatagatttaatacagctatgacttgtttttctaaaaattgatatttttttacaatatcattaattaatgtcttttccatgttataaccactctttgtatataaattctatttaattttaacatatctttatttttacaatacattttctaacaataaaaggagcgacatagaattcaatatgaactcattggtcgctcctcaatttcattgcctagcagcttgttgtaattttcgtattgcagttcgttgtaatctagatacatgcatttgactaagtccaatacgttcaccagtttccttttgacttaatccttcaatgaaagtacattgaataatttctctttctctatcagataagattggtaaaatacgttcaagaatcattcgtttttcagtaaggtcgtaattatcatcttgttgacccataatatctaacaatgtaactgtagaaccatccttatctgcttcaattgaatgatctacactaagtgcgttatagctttgacccatttccatggcttctaacacttcttcttcatttacttctaaacggttcgcaatttctaaaattgaaggagaacgtccgagttcattcgtaagttcatcgcccactttttttattcttggaccaatttctttaattcttctaggaacatgaacgctccatgtcttatctcgtaaatatcttttaatctcaccaataacagttggcactaagaatgcttcaaatttgcgatcgaaagatatatcaaatctgttaatagcacctattaaaccaaccatacccacttgaactaaatcttcatgatgtgattgtccttttgaatacttatatgctaatgattcaattagtttgcgataatgtttaactaatttatcttgcgcatgaggatttatattgtcttggtgttctttaatccattggttaatttgttcaggtgatatctcattaactgatttcgactctttcgtcattatttggcacctgctctttttttatatacttaatcatactaattgttacaccagactcttttgaaacttttacttcatccattaatgattcaatcaaaaatagacctagtccaccttcacgtaagaagtcgatattttcgttttcttggtaaggccctaattttgattttgtagattcgtagtcaaaactttcaccttgatctgaaataataatcttaattttgtcatcaaataattcaaaacaaatattaatcataccattttgttcactatgtttatatgcatgtttgacagcattagtaaccgcttcacttactgcaatttttgaatcttcaatgtcatcgtatgaagcacctgctcttgtaaatacccctgataaagtaaggcgaattaaacttacatattctgctgaggcaggtaacttcatttcaatataatcatttttgagtgacaaattactctacctccgttccttcattaacgtgcattaaatcttttaaacccgtaatatcaaataatctactaattctatctgtgacacctaaaatatataattctttatcattttgatttagagcctttaatgttcctacaaataagcctaaacccgttgaatccatataacttacatttgctaagttcacgtgaatgtcatgatttccttcttggcgcataggcacaagtacttcttctaactcaggtactgtatatacgtctaactctccaccaacaataacttcataataatcaccatgggttatcgtttctatattaagattcatttacttacactcctaatctttttcgatatgtatactatagcaactatacccattattattataatataatcaaaaaattaaataattaattcactctttttattattaaaattgtcatgtcatctcttttttgcgtattttgtatttttaaaatggcttcatataagatttgaacaatatcttggggatgcatatgcttatattttctaattaaattaagaacagtatcttttgcaataaactccccttttttatttctagcttctgttacaccatcagtaaaaataataattaaatcatctaaatatattggaatttcttgttgactatatcgcgtatgttgacttacaccaagtactcttcctcgaacttcaatttcttcaaatgtttcagtttcagctctataaatgtatcctggttcatgacctgctgaactacaatataataaatgattcatttcttcatatagtccataaaacatcgtgacgaacatattttgattaacatttttttctaccacacgattgagtcgttttaaaccatcacttggtaattgtgaatgaccatatgaatccattccaaatttaatcatactcattgctaatgctgctggaatacctttccctataacatctgctacagcaaaactcatcgtaccatctctatgatcaattaaattaaaatagtccccgcttactttttgagcagctactgaaataacacctatttgtatactatcaaactgtggaatatctgtttttaacatcgtttgttgaagtctagaggctaagtcaatttctttatcgtggaattgcattttatcaactaaattttgataatctctatagctatatccaaagccttttactacttcttctaatacatctaatgtatctaagatttgagatgtttttaaatttaaagaagcaatatacgttttatgtaaatcaacaacatcctctggtagaatatcctttttgattacttcttcagtgaattcatcgcacttctttaaaaattgttctttatttttagtaaccaaactctcatctataagttgcttatagttttttttaaattcttccacgaattttgcctccttacttcatagctgattaaaacatgtttaaatattgtctgacacaatacaacattttaaatttattcattaatgctaaatgtatattattctaaaataactcttctacttaaaaagggagcaagacagtattcattttgtgaatatgctgtcttacccccgcaaggttaattgaaattgaaaacttgagttaaatattttcaattcagttaactactgcgacatctctaaatagtcataaacttactcaatagtatcattgaattcgaccgaaattagtctaattaaaacttttcaaaagtacaattgatttatttcaaaaatttatttcgtattttttggattatacatataaaatactaatttttttgaggacaaacatcgtgtaaacctaaactgatatccaatgcatcgtcaacttctttcattttatcttctgataaatatgtaagtttctctttcaatctttttttatccaatgttcgtatttgttctaaaagaatgactgaatctttatctaaacgatattttttcttttctatttctacatgtgttggtattttcgctttattaatcctaccagtaatcgcagcaacgattactgtaggactatatttattaccagtatcattttgaatgataactacaggtcttactcccccttgttcagacccttgaactggtgataaatcagctaaatatacatcgcctcttctaatcattcacttttataattagatgtaagatatgattcgttacaatcacaagcttcacattctaatggaaatgcttcagttgctagggagaggtttaaatcggccatttggacatagccttcttttagtgattgttcaagactatggcttctattctgattaaaagttaacatactatgaacctccaattgatacaaacaagacattataaactttaatttagttttataataacaaattttgtaacaagtgactatactaatttaataattcatttgtaacttcaaattttttatttaaataatatattcttggaagtctgcgtcctaaattacataaaacttcataattaattgtattttgttttatagctaatgcctctactgcttgtgaagaatttaaattgttatctattaaaataacctcatctccttctttcacatcatctggtacactaataatcatttgatccatgcatactcttccaatgatttcacattgatgttgattgacatttacggcgaatccttgcatagctcttaagaaaccatctgcatatccaattggtaaaaccgctattttcattttttcagttgcagtgaatgtacttccataacttacagagtctccgggatttaaatatttagtttggacaacttgagtcattaatttagcacttggttttaattgaacatcaacttcatttctaacatactcagaaggataataaccatatagtgaaattccaagtcttaacgcattgcataatttacaatttgctaataaagcgcctgctgagttttgagcatgtatatattttggtcgctctgcttttgttaccaactcttcaaaaaatgcatattgctgtttcattgaatcaccaggttcatctgcattggcaaagtgagtaaagacgccgtcaaaaataagagttggatgttctttaataagattaatgactaactgatactcttcaagcgttttaatccctagtcttcccattcctgtatctaatttcacatgaagatatacatgatctgagttatcttctatataatgaatcgctcgttctaaccaaaactgtgaaggtacagttaaagtaatgtcatattgaatcgctttatttatatctttcggtgatatcgcacctaaaactaataatttagcatttatattatgtaagcgtaattcaatggcttcatctaaagtagcaactgcaaaaaattgagccctattattttctaaaatctctgctatttttacacttcctaatccatatccattcgctttaattacaggaatcactaacttatcactttgaagtgttttaaaaatattataattgtatagaatggcatcaagatctacatttaaatatgtcggtctataagcaacatctgacatatgaagtcctccttatttaaacttataaaaaattgatatggtttatttttctaatattacttcactcattgcgtaatgttgtgtatgcgtaatcgagacatgaacaataaaaccaggatattcgatgcaaggtttccccttttcatcgttataacaatcaatatcattaaatgctaccgtttttcctaaccctgttcctaatgctttactaaatgcttctttagttgcaaatcgtcctgctaaaaattctaattttcttttatcatttttaaaagagtgaaatttttgctgttcttgatctgttagtattctatgtattaatttatcactttgtttaatatacacgtcttttattcggtcaatttcaattaaatcaataccaataccatgtatcatatctacacctcacttaattatcctttattatttatatagttcgtgttttctattttgaatcatttgttttaaataaatcgcttctttttttgcaattagttctatattgcattctccacctgcagtagataaatgaagatgtgctaatttatattttctcattatgaatccttctatgacctctatattttgtattctataaaacggtattatatctgtttcaacaatgatgataccttttctaatatgaatctcgttttcatcatagtaataactgaaataatgatatctcagaagcggaataacaataatacatagtataatataaagcaatataattactatagaaacaatgatattaattgaaagttttgatatatgagtaaaataaacatctatcatattgagtagaaataaaaaagcagtaataattataaggcctatcaatgatgtgattctcatcacctttagaccacttgtattcataaaactatgttcactcaatcttagaccctcctaaataggtctcaatatttaattgaacctgtttttcagaagcatattttagcttaatatcttcatttaccgcacccttagctataataaaatgtaaatgtgctaaatggctcttttctaacaatggagtttgattaacattcataccaataattttatcctttttaaaataataagaattaatatgcatcatacttacttgacgaagtgcaatttcattttttctattgcataatccagaagcagatatatacacatacgcataaattgccataaagataataataattatggctattatataactccatatactccaatagtaagcacctatagttgcaccaagaattaatatgatactaggtataaaaaaatgtcgatgatatcctcgttttggtacattttcagtgatagcgttaaattgcatttcaggaattaattttctaataatagaatatgcctcttttttattaataaatggaagaatcataatttttccgttttcacttacatcttcattagatttaacttctaaatcacttgtaataataaagtatatagaggtatatccaaataactttctaataaatgactgtttttctacaactgcttgtaatcgttcaataggcactgtgatattttttacatttagtaatccataagtaatttttaactcattatcacgttgtgtgattgtatagttataataacgtagaacaacaattagagtacctataacataacaaaatataagtacagtcaatataataatagtcactagaaacgtaactgactgtatccattgaaaaagacgagacgtccatttttcccacgggataacatcttcaaacgcacctataatgggggaaatagtggcgaatgctacacctatcacgccacttgtcaatgccatgaaaatcaatagtttattagacattttaaatattacttcattattactactatcttcagatattaattcttgttcgctattattaggcttattatcaggctctatttcttgactgtctaactgaagttgtctttttttaattgtacgttcaatcaattcactttgttgtttcgaaatcgtttcaagttcaataccatcactcggcgttttaatttgtaatcgtacgccacctactaattgattaagcagtccttgtgtggtatctaaggattgaattcgattcaaatttaattctttgcgttttttatttaaccatccagatgtgactataaattgatcattttctatccaataacgcgttagacgtactttttgaaattgattaatcatagaaaaaagaataatcaataaaaagatacctggtccaatataatgtctaatatttgtaaaatcaaaattccatatattaaatccaataaacacgataataacaaaaatgttttgctttataacatctattagacctgtgaaataagaaatcggatgtaatttttgaggtttaaatatcatcattactacctcgcatttgtgataagatatgtaatattaatcgttctgcttctttattagaaacaaaaggtgttgtgagttcatgacctgcagtcacaacaatgactctcttaagattaaactttttcaataacggatttgttttaacctttaaaagttgtaacctttcaatttttgttgttttatagcttttaaaaataaaagtatttaaaatttctatgttattattttctatattataaaatctataagagtatctattgatgggttgtagaataaaacgaataaaagaacaaatagttaatacaagtagaatataaaaaataaaatggggccagtgaaatgctttccaacaatacaacccaccacctaaaataatgagctctattagtaatgtgactccacttaccaaccaatgatataaaaatgcggatttaggacttttatgaaaagagtgatgtaattgcacaataaactccttaacaatttttttatattatatcatactatttttttaaaataatatgatagatgttaatgaaaaaacaaaactgaatactatctatttaaatacgatcaactatcctctttttctttaaaacattattagtacaatcatttataaatttaataggtaaaacttataatcaaaaagagcttgagacataaacatatgtctcaagctcaatcaagcaaatttaatcttatctataacaactatttttgtaaatcagcaaacgtacgacctttgatagatgtttttcttttatcttgtctatctcgacgatcttgttttttaccttttttcttattgaagttaccttttgatcgtttatttttgttgttaaatttattgtttcgtttaccaccacgtcttgattgattacctttattattacgactctttcttgcaagtggcttttcgaaagttaattgaacttcaacttcatcgtttgcttcgacaagttcttgtaataatgaagctactaattcagtgctatcatattcttctaataattcactagaaatacgttttaaacgatcttcactctcacgtgacatccagtttttaactttgtctttaatatcttcttcacgtgctttaagcacttctttacgatgaggtggtcttaaagctttcattcttctgtcatttacttcttcaatttgacgaatgtaatccatctcaattgggttaacaaacgtaacagcaataccttctttacctgcacgacctgtacgtccaattctatgtgtataactttcagtatcttgaggtatatcaaagttatatacgtgacttacacctgaaatatcaagaccacgtgctgcaacgtctgtggcaactaatatatcaatttgatcgtttttgaattttttaagtacttctaaacgtttggcttgtgtaatgtctccatgtaatccttctgctttgtaaccctttgtaagcaatgcacttgttaactcatctacacgacgtttagttctaccaaatacaatagctaactcaggttgatgtacatctaagaaattagtaaatgtatcaaatttctctaactctttaacaattgtatagtattcgtcgatttgaggatcagacatttcattgttcatcgttttaacaatttgtggtgatttcataaattgttgtactaatgtctgaatagctttaggcattgtcgctgaaaatagcattgtttgtcgttgttcagcagggattttatccataataaatctcatatcatcaatgaagcccatgttcatcatttcgtccgcttcatctaaaattaaagtatgaatatcattcgtttttaatgtacgacgattcaaatgatcgataacacgtcctggcgttcctactacaatttgaggcccacgttttaacgctttaatttgtctatcaattggcataccaccaaagacagtaacaacttgaatattttgtccacgactgaattcgcgtaattgttcagcaacttgcattgctaattctcttgtaggtgctaaaattaaagcttgaacacctgattttccaacaactttttctattaaaggaataccaaaagctcctgttttacccgtacctgtctgagcttgtccaaggatatcttttccttctaatgtataagggatactttctttttgaatcggtgttggttctttaaaacccatttcttctagggtttttaccgttttatccgaaatccctaattctttaaaattttgcaatataattctccttttaattcttttatttatcaatatacgtttttgtatataaggtcttcttattacgtcaacttctatatagtaccacctaaaaatagttatagcaataaagcaattttcatatctacagcaagtaacgtttttaagtagagtatttgttctattaaaataataaaaagaagttgctttgaaacctttcatttctaagcaactcttaattataatgaataattaaattaaagcatttactacttcttcaagtttattaccacgtgaccctttaattaacactttgtcatcaggttgcaaaatagactttaagtaatgagtcagttcatttttatctgaaaaataagctacatcttccacaaactggccacctgtacgacttataaacttagcatcattaccgtaagtaagtaacgtatgaatacctttattgtccaaataagtacctacatcttcatgcatacgttgactattttcacctaattctaaagaatcagcgagtacaatgattttacgtccattcatatgacttaatgtatcaatagccgctttcatacttgttggacttgcattgtaagcatcattaataaccgtaatttgattatcagtaacatgtcgttccatacgcatacctgtgagttgtacattacttatattcttttgaattgtgttgtaatctaaaccaagttcatgtccaattgcaatagcgatagtagcatttttcatgttgtgaatacctaaaattggtaattcataatgttccttgttattgatcataaatgctatgccatcatttttactattttcaactttacatactaatgtattttcatgatttaaaccaacactaacaagttttgcatttttcacattttcaacatggggctttagaagtggttcatctccatcatatataaatgtgccatcagatttaagaccaatagtaatttcagatttggctttagcaataccttctctagaacctaaatcttgcatgtgagattcaccaatatttgtgataaccgcaatatcaggttccgcaattttagataacaattcaatttcgtggaatcctgacatacccatttccaaaatagaaatttctgtgtctttgtctaattgaagaatggttaaaggtaatccaatttcattgttatagttaccttgtgtttttttgactctaaattcggtatgtaacacactttcaatcatatcttttgttgttgttttaccattagaaccggtcactccaattacttttggattaacatgctttaagtacgctttagctaattgttgtaaagcagttaatgtatcatcaacccatataataggtccttgaattgaatcgctaatatcctgtcctttttcataaaatgaagcaccagcaccactttttagtgcttgttctacaaaacgatgaccgtctacattttcgcctttaaatggaacaaataacatttctttttctacatggcgagaatcgatagtgactcctttaatttgatgttctaaatatgcttcatcaatatcgcaagatatccatttttgtatttgttttaatgaaacttcaatcatacttaggctcctcgcttaatcgatagtatatttatttttctttttatcttcgtaacgttctttagctaaatcaattagtttagtgattaaatcagagtatgataatcccatattttcccataaacttggatacatgctaaatgctgtaaaaccaggcatcgcatttgtttcattaatgtagatttgattatcttctgtcacaaagaaatcagcacgtactaatccagaacaatctgtagctttaaatgcttctaatgccatattacgtagcgtcatttgaacctcttcatctaattctgctggaatttgtaaactgattttaccatctttatattttgacttatagtcataaaactgaacatctttaattacttctccaggccatgttgtttcaggatagtcattacctaaaactgcaacttctacttcacgtgcaataacaccttgttcaatcactaacttacgatcaaattgaaatgcttcttcaatcccttttttaagttcatcttcattattacatttactaatacccacactagagccaaggttagcaggttttacaaatactgggtatgttaatttatcattaacgagtttaataatattaccttcatatttttcatattcacttcttaaaaaactaatataaggtagttgaggtaaaccgcgatgttcaaacaattgtttcattactaatttatccatcgaactggatgcagctaatacaccatttcctacatatggcaaatctagcacttcaaataaaccttgaatggtaccatcttcaccatttggtccatgtaataatgggaaaatagcatcatatttatttccttccccattttcttttaaaagtaatgtaatttctccaggacttatatcttctaaatgtaattcttcaatagttttaatgttttttgtaatattttcttttttcttccattgaccatcatttgtaatatatataatatctacaagatacttgtctttattaatcgcatttaatacattttgtgccgttaaaattgatacatcatgctcagcacttttaccaccatatacgatacaaatattttcttttaccatgctttatatcctccatcgagaaaaataatgacaaaagccatttataaattgaagtttaattacgcttttgtttctctcatcataattataatactataatgtattaagtttaaattgttaattatacgtttcattaacgatatgtaatttaaattattctttctaaaagttcatattatcacagtatcagtattttttgcatttaccaataaataaatatataaatttcttaaagaatagtccactcatgttaatggttattttttagattaaaccgcttcgactttatatcatcttctatattttgtagcataatcatataaagtcatgtaaaatctatatatactatcccatagaatttaaggagttttttatgaaatattcatcccgtcaacagcctacaacacattggcttcgaaaaattgactggatacttatagcattaataatgattttagccatcattagtgtgactacaatcagttctgctatgggtggcggccaatatagtgccaattttggtattcgtcaaattatctattatattttaggagcaatactagcacttattgtgatgattttttctcccaaaaaaataaaaaataatacatatatatggtatatcttcttttgtatcttactactaggtttattaatcattcctgaaacacctattacgcctattattaatggcgctaaaagttggtatgcttttggtccaattagtattcaaccttcagaatttatgaagattattttgatacttgccttggctaaaatcgtttctaatcataatcgatttacatttaataaatcttttcgtactgatttaatcttattttttaaaattattggcatatctctagtacctatgatattaattttacttcaaaatgatttaggaactacattggttctatgtgccattattgttggaatcatgctagtgagtagtattacatggcgtattcttgcccctatctttattactgtagcaatattaggaagtagtattattttagccattatatataaaccctctctgattgagaaaacgttacatatcaaaatgtatcaaatgggtcgaatcaattcatggttgaatccttatgcttatagtaatggagatggctaccatttaacagaatcgttaaaagctataggatccggtcaattatttggtaaaggttataatcacggagaagtatacattccagaaaaccataccgattttattttttctgtcattggagaagaaattggatttattggagcagtgatattacttcttatattcctagctttaattttccatcttatccgtttagctataaaaacaacttcatcatttaataaggtatttttaattggttatatttctttactcgtcttccatattttgcaaaatatcggtatgacgattcaactcttacctattacaggtataccactaccttttattagttatggtggtagcgcattatggagtttaatgctaggtattggtgttatactttctatttattaccatcaaaagccagcgtcaaaagatgcttaataataaatatattttaattcagttaataacatgaaaatagtatgaatgagaatgaaacaaaactcattttgactttatcgttccacttcagcaatgtatctccaacacataaaaaagtctgagaaaactaataatgtctcagacttttttcaatcacatattatttaagttcttgagtaacggtttttgtggtaggcaaagtattaataatgtcgaaacgagattttgtttttttgatattgacgcctaaagatgataataatttgactacattttgtaacttatctgatttgttcatggtatctcacctcgttttttgaccttcaatgatatactaccctaattagtcatgctttactactatatttgaaaattattttaaattatttaagttacactaaagctttttattatgaaagtactttaaatccagtgtcataaatttctttttcaatactatttaaattagtaggtgtttcatattcaacattaatcttatttctttctatatcgattgataccgtatgtactccaatcatatttaacaaacgttcatttaacatttgtgcttgttcttctgtttcaatgttatctataaatacaatattactgtttaacatattacaatctcctaactaatctttcactagtttttgaaatgtcactagtagttcttccattgcttcttcttcagtaccttgatttattttttccataatacaacttttcatgtgatgttctagtaacttagtagcaacactattaagtgctgaacgtgttgctcttatctgagttaatacatcatcacagtagacgtcttcatcaatcattcgattaattgctttaacttgtccttctattcgatttaatcgagattttaaatttaatttaacttgctcagaatgatgggcatgattttgattttccaactaattcaccctttcatagcttctatatcatcgtataatttcctctttattacgtcaattatacatttttattttaaaaattaatcataccatttattatagtgcatggtacaatatttgttagtacattaattttaaacgatttaggaggttcaattaattaatatggtagagatcgtgcaattatctttctcacactcttctttaattattaacatcatattaatcactgcctttatattaaacttgattttcgcatttatcattatcttcatggaacgtcgtagtgcaggttccatttgggcgtggcttttagttcttgtatttctaccgatagtaggatttattttatatctattattagggcgtcaaatacaacgcaaacatattttcaaattaaaaaaagaagatcgtaaaggtttagctatgatagttgatgagcaattaaatgcacttgaaaaagatgatttttctaaaggtaatcatcaaattgttaagtttaaagaaatggtgcacatgttactctataataatgctgcattcttaactactgataacagtataaaaatctttacagatggtcatgctaaatttgacgcattaattgaagatattcagaatgctaaagattatatacatattcaatactatattttcaaaagtgatgatcttggacgtcgtattttaaaggcactcgaagacagacttgaagatggtatagaagttaaaatgttatatgatgatatgggctcaagaacattacgcaagaaagatttgaaacagtttaaagacaaaggtggacacgcagaagccttcttcccttccaaattgcccttaatcaatttaagaatgaataaccgtaatcatagaaaaattgtaattatagatggcaagattggttatgttgggggggttaatgttggtgatgaataccttggtaaagataaaaaatttggttattggagagatactcatttaagacttgaaggtgactctgtcaatgcattagaattaagattcatcttagattggaattcacaatcaacacgtgacaatatcaaatatgaagatagatattttcctgatgtagattcaggcggcgagattggtgttcaaatcgcttcaagtggtcctgatgaagactgggaacaaattaaatatggctatttaaagatgattatgtcagcaaaacattctatttatattcaatcaccttattttattcctgatcaagcttttattgatgccataaaaattgccgctttaggtggtgttgaagttaatttaatgattccatgtaaacccgatcatccttttgtttattgggctacattaaaaaatgccgcttctttattagacgcaggtgttaaaatctatcaatataataatggatttctacattcaaaaacactcattgtcgatgatgaaattgctactgtaggtacagcaaatatggataatcgtagtttttcattaaatttcgaagtgaatgcgttcatttatgacgaagatatttctcttcaacttaaaaaagcatttattaaagatatgaaagtctcatatgagttgactaaagaattatataatcaacgtagtacttggattaagtttaaagaaggcatatctcaattattatcacctattctttaaactcattcaatacatgtttttaaaggagtagtttatgaatcaagcagaacaaatattattagctaaagaatatatgtaccaatttcataaaaatgattactctggacatgatattgcacatattgaacgtgtcacattattagctaaatatattgccaaacaagaacatcaaggcgattttcttacaatagtattgtcagctttattgcatgacgtcatagatgataaattgactgataaacaccatgctttaagcgaattacatcaattttttaaaaaaatagaattggatgatactgttcaaaagaatattatttttattatcaaacatttgagttatcgaaatggtagaaataacgatgttacacttccaatcgaaggacaaatcgttagagatgctgatcgcttagatgctattggtgctataggtatcgcaagaacgtttcaattttctggacatttcaatgagccgatgtggacagaatctccctatcattcaattccttcagaaaaagatatggttgatttacctccttctgctattagacacttctatgataagttattaaaattaaaaaaattaatgcatacacaaacaggatttcaactagctgaagaacgtcatcaatttatgaaactatttttatctcaattttatagcgagtggcacttagaagaataaaaaaagtaggaaaagatcatctatcttttcctactttttatcgtattatgcttatattattttttcttcttattatttttagaaacaacttgcgtatttttaccttttttatttgaattattttctttatgtgcctcaaccataggtccaatttcttgttttgcaactttttcataatgtttatttgcaaagaatatttgaataattaagaatgccgcactgacagaccaatataaacctagtgctgaagctgaacttaatgaaatccaaataatcataataggtgaaacaatcatcatcatataagtcatttgacgttgttcttcaggcatttgtttacttgacacccatgcttgaataaagtataacacaccggcaataatagtaatccaaatatcaggatgtactaaattaaaccataagaaatgtggatgttctgtaataccgccaccaatacgataacgcaatacgaaatataatcccataacaataggcatttgaattaaaacaggtaagcagcctaaagcactcttcataggattgatatcatatttcttataaacttccatcatttcctgattagcagccattttttcttcttgagtacgtgctcgcttaactttttcttgtacaccttctacttcaggtttagcaattttcattttttcacgcatcatatggctatttttatagtttgatagcatgaaaggcaataagataatacgaataactaatactaaaacgatgattgcaataccataatcatcatgaaaaacagaatggcctaaccaatgtagaattttagccattggttcaacgaatgtattgtagaaaaatccatttctattactagatttggaatagtcacatccagctaaaaagaccattacccctaataacaaaggtagtagcgctttcttcttcatttttacacctctattgatatattcacgtagaaataattttatcatagatagggtgtactagaaaacaaaaactgaaaaaaagagatatttatttgaaatagtgctttaatttattaacagtcttgtcaatattttgactatgtgtaatgactgaaataactgacacaccatcagcgccttctttagctataagttcacaattgtcttcagtaataccacctatagcaaccataggtaagcttggattaatattttttaatgttgcaatcatttcaggacctacaggggcacttgcatcagattttgaagatgtctcatacattggacctacacctatataatctacgtgttctaaatctgattgttgatattcctttacgtttcctacacttaaccctataattttatttttaaaacgattagcaaaagaagcaattatttcgtcatcttgacctacatgtataccatctgcatcaattttttcagctaaatccacatcatcattaattagaaaaggtactttatactcatgacaaagtgtttttaattccttagctaatacttctttttcatcccctactaaagcatttggccctttttctcgaaattgaaataatgtaattcctgattctaatgctgcttttaaaacatctttaatattttgatcaccgatgatgtcttgtgttccacatataaaatagacttgtaagctttttgaatcaaacatatttaaacctctttacgttttacaaattgtttataagtatcatagttaagttgatacatttcatcaagtaattgagataagaatgttccaggtccattaactttttcgcttttttcagcaatctctgcggcgatattataataacttactgattcttctaatacttgtaatgacggatgtgtatttctaaataaaaatccagcaactaaactgcctaataaacaacccgcgcctgtgatttttgcaagtaatggagaaccatttgataatttgacaatttgattatcttgaataataacatcttctctacctgtaataacaattgctgtttgatatttttcataagcttttttagcaattgtcactacatctaagtctgtttctccatcagtgcctttcattgtagtatttgaatctactaaagtaagaatttcagatgcattacctttaattacagaaacatttatttcagaaagaaaagattcacaaaattgtttacgatatgttgatgcacctacagcaactggatcaaatacaatgggtgtaccttgttgattagcaatttttccaatttctaaaatatctttttcatttgctttatttaatgttccaatatttataagcagtgcccctgctactttatagaactcttctgcttcttctggagcttcactcattgctggacttgcaccaatactcaagagtccattcgcagtgaagtttttaaccacatcattggtataacagactactagtggattctcttgtcttatcttttctaaactattcatcgtctaaacctactttcttcatataagcaaaatggtttaccgggccgcgtccttgaccgatttcaggtgtatgttcaatacttaatgaaataaattttttagctttttttacagcttcataaatggttttacctttagctagttcggctgtgataacagctgaaaatgtgcaacctgtaccatgagtatgtggcgtattaaatcgcttctcttcaaaagtatagacatcatctttagtaaataaaaagtctttagcattatttaaatcagcagaatgaccgcctttaattactacacctttacttcctatttcatttataaatatatgacctgctttacgaatattatcttcagtatcaattttcaagccagtaatttcttcagcttctggaatgttaggagtcacgacatccgctaatggtaagagcgttttctgaagatgtttttttgtttcatcatccattaaggaatcgccacttttagctagcataactggatcgataacatagggaatatcgctatgattttttaaatatgtttgaatcagttccatcgtttcatgtgtagcaatcattccagtcttaattgcatgaggtaattcatcatcaaacacgctatctaattgttctttaacccaactagtttctagattatggatatgttgaactcctttagtattttgagccacaatacttgtaatagcagccattccatatacgccacaagcatggaatgattttaaatctgccataactcctgcgccaccagaagggtcagtaccagcaactgttaacgcaatcttaggtttattcatgatttgctcctccaaaatcccattcttcatcaatgtatgccatattaaagaaatgacgttcatgtacagtactttgtaaaaatgcttctttaatttctcttttttcctgttcggtacaatgttctgtaagttcatttaacaaacggtcaaatacttcaattaaaggtgccatttcagtgctataaaaatcaaaccacttagcagtaagtgcatctctattaagatttgaatcttctaatccccatttagcaaccacttcatatacgtaaggacatggtgccattgcagctatagtgtatgcagcattttcgtgggtataagcatgataatacatatgtttaatgtaatgatctccactaggtggccacactttttcttttacaatttcttcataaggttcattaatatagtccgctaaaatttcatgggcttctacttcgccatctaacataaattcaatttgttctactaagaatttcacttctttcatagtaggtgctttaggaataagtaaagcatataaattagtaaattcttttaaataagaagcatcagcacgtaagtattggcgtactgcttgttttgataattttccttttaataaatcttgaataaaaccatcattataaatctcttcaataattggctttgacgcttgctttaattcatctgaaaaactcattaactattcctccttaaataaaaaaactacatttcaacgtagaaatgtagtcaatattcaaaaaaatagaatgaatgaatatgtattactactttcctacgttggcattaaccaaatcaggttataagggtctgaatgcttcatctcagccatattccatggctcccctagtagtctttagtttaacttaaccataacaaaaccattgttataattcaaataaaaaagatattcattgaaataagtttaattcatacaactattattataaatataataaataaagaatagtacagaaatctttttaaattcagtcattactatcaatatatataaaatgcctaagacaactcatattgtctcaggcactagtaaattatttattaagttttacgctgtaacccattgagatggacctgcagtattataaagttttactgccgctgcatcttgaacactttcaggtgcttgtgctggtgatacacctttatattgtgctggtgctactgaatcccaagtagattgtaagaattgatatttacctgctgcaccagaagaagggttgattgcatgaatatctccacctgattcgcgttgagcgatttgttgtaaatgactatttacatttacagaagaaccacttgttgattgtttaggttgatttgtagttgcattagcaggtgcttgttgtgtttgagttgcttgtttagtttgtgttgtttttggtgcttgttgtgtttgagcttcatttgcatagtgttgacttacatttgaagttgaagctgattgatttatatttttataattattattttggtaagatacattttgtgctgtttgagttgaagctacattttgattagcactatttacagttgaaccgtttgatggataatattcccatttaaaatatgttccatctgaccaaaaatgataagttttaccatttaaattaaattggtaattatatgctccttcttgaataggatgttgatttaatgattgatcgttagattccgctaattgagctaatttttctttattaatttgattttcacttgcatcagcatgacttacgtttcctgctactaatcctaaacctactgctaatgaagatgcaataattgtctttttcataatagtataatcctcctaagtcatttattttcttaaataatttacagatactactctaacatcttaaaaagcttagcaggttacagtgaaataaaaaagaatgtatttattttacattaaaattacataggtttatagataattcttcttatatatatactataaaaactttaatggcagtatttattagatatataataaaagaattaactgtaatcatcttgtaatatttcagaaaaatgaactgtattttttatcattcaatgaattagttgtatctaatgtctcatacatagttaaagaggtcggaatatttataccgacctcttgagtatatttgagtataattgaaagacttattttatattaattggaaaggtttggagtattaaaaatagagagttttattttatattcattaattcgagatgatcaaatggataagtgtctgtatttagtgagttatctgagagtttttcattatttaatttaggggacataaatttaattgtttcaacatataattctgttacaaagtgagtttgtttttccttttcatatttacgagaacgcatttggccagtaatacctactaatgatccttgagaagtatatttttcaatgttactggccatcttaccaaatgctttacacaatatatagtcacacgctatttcatcattttcatctttataattacgttcagtagccacactaaacgttgcgattttcacctcctcattattataaatttttgcatctttagtcatacgaccaacgattactatcttatttaacatgtgtcacctccttatatcgttatattaaatagaattgaatataacgtcaaaaagctatttttttaaatttcttccctttttagtattaatatctgatatatttaagaaaaatattaagatatgacacttcttatttaacaaaaaaacaataatcatataatttaaaaatttttaagagtataggagtaatgttatgaagacgtttaaagcagttcgattccaaatagtaagcgatggtaacaggatttcagaatttgaactttatgatggtgtgattataaataaagaaagtagtggtacaggttggcttctggaaattgtaatttcagatacacattatgatatcatgcaaaaatattatgaatcacaaacaatattagatatcagagtagtgattactagaccttctaacgatccagcattgtttgatgcaacaataaaaaacatttctctatttgcaggaaaaatgtcaattattttcgagtgtcatatttatacacatcgacaagtatacgcagaaactctattagaacaacttattgatgaaggattatcaggagaagaattgaaaatcacattcaacagaatgatgcaatctaagccgaaattaaaagaagaaaaatttaaaaaatagaaatagagtaataacgaaatgatttatttcgctactactctattttaaattatgcatcttgaatagcaaaagtaagttcacaactacaagcaagctgtccatcaacagtagcttttgctgtaccttttccaataggacctttaatttttgtaatttcaacttctaacattaaagtatcaccaggtgtcacttgttttttaaatctacatttatcaataccagcaaataaagcaattttacctttattttcttcactatttaacatagctactgctccagtttgtgccaaagcttccgtaatgagaacaccaggcataactgcataatcaggaaaatgcccttggaaaaatggttcgtttcctgaaacttgttttaaacctacacaacgctttccttcttcatattcaacaatacgatcaataagtaaaaaaggttgtctatgagggatgattttttttatttcattataatcaaaaatggtttccataactattacctcaaatctatttaaaaattagtcagtgactcttttgatatctgcaccaagtgattttaacttctcatggaaattaacataaccacgatctaagtgtttaagctctgtcacttgagttgtgccttctgctactaaaccagccaaaataagagctgcggcagctcttaaatcggtagcttttacttgagcaccttgtagttgacttttaccttctattttagcacttctaccttctacattaatattagcattcattcttctaaattctgcaacatgcataaatctattttcaaatactgtttcagtaaccactttatgaccttcagctgttaataataatgccatcatttgtgattgcatgtctgtagggaaacctggatgaggcagtgttttaatatctacaggttgaagttcaccatttgtagtgacatgtacaccctcctcattaaaatcgagattaactcccatttcttctaacttataaattaaacttgtcatatgttctttaacagcaccttttacaaaaacatctcctcttgtaattgctgctgcgataataaatgtacctgcttcaatgcgatcaggtataattgcatgtttaactcctgttaatttctcaacaccatggatagtaatggtatctgtaccagcaccaataacgttaccgcccatttcattgatataattagctagatctacaatttcaggttctttagctacattttcgataactgtttttccttgtgctaaagaagcacccattataatattttgagttgcacctacacttggaaaatctagatgaatatttgcacctttcaatccctctttagtgcttgcatatatatttccgttttctaaatgaatttctgcccctaatgcttcaaaacctttgatatgttgttcaattggacgagcaccaattgcacagccacctggtaatgcaacgattgcatgacctagacgtgctaataaaggtcccattactaacacacttgctctcattttactcacatattcataaggcgcttcttcatttagtgtagcagaagcatcaactgtaactgatccattttctttatcataatccactttagcgtttaaagtagataaaacattattgatagtaaccacatcacttaaatcaggcacattggttaatttgctttttccttcagacgctaataacgatgctgtaaggataggtaatacagcatttttagctccttctacttgaacttcaccagtaaggcgattgcctccatttataattatcttatccatattaatcctccacattaaactcctatttcttataacatttcccattttgaattacttatttaattagtatatctacatttttagttaattgatagaaattcattttttaaaataaatatttaatttgtgtagagtactgtaataaatctacgataaagttacttactgcagtacccattaaaattgctaagaaaatcatacacacttgcagtcgtgttgaatatccttttttaaaaaattgatctaatctgagagaatgtaatgtccagtacgcaatacatatacatattacatgtaaaaataaatgtattattgcaaattgtccaacatattccattcttttctctccttaaagatttctgtaatatattgtacattaaaaaagttaataatgatacataagaacgttacaatatttaataaaaagtaactaaaataaaaatttaaagttattattattctaagttcttttatgtacaataaaaaaagagtttgaaacactattaaatgtctcaaactcttttaatatattaagaataattaactaaatcaaaatattttaatacctgttactttttcattaaccattctcactaaagtgagacaatatattcatcataaatattatcccacgtcatttaatcattattttaattcagctacacgcagacggttttccgctctagctaatgcgcgtttagctcggttaatgtcactgttatcctcttcatctaaatgagactgtgctctttgacaagccaatttagctctttctacatcaatctcactagctgtttcagctgtttgaacaatgacagatactttatgttgtctaatttcaacaaagccaccactaacagctatatactcagtaccattcttaaacttaactttaatatggcctatctttaatgcggcaactgtcggaatatgtccactcatgatacctatttcgcccgcagtagtttgaaatacaacgagttcaacatcatctttttcgtagactgaaccattaggagtgacaatatcaagatttactgtgttcattatctttacctcctaattagtttaaacttcaacacccatatctttagctttagcaataacatcatccatacttccaactaaacggaatgcatcctcaggaatatgatcgtatttaccatttaagatatctttaaagttcgctacagttgttttaactggaacataagaacctttttgaccagtaaattgttcagccacatggaagttttgtgataagaagaattgaattctacgcgcacgttctactgttaatttatcttcttcagataattcatccatacctaaaattgcaatgatatcttgtaattctctgtatttttgtaatgtagattgaacttcacgtgcaacttcataatgttcttgtccaacaatagatggttctaaagctctagaagttgaagctaatgggtctaccgcaggataaatacccatttcagttaatttacgttctaagtttgttgttgcatctaaatgtgcgaacgcagttgctggtgctgggtcagtatagtcatcggcaggaacgaatactgcttgaattgaagtgactgaacctttattagtagatgtaatacgttcttgtaattgacccatttcagttgctaatgtaggttgataacctacagctgaaggcatacgtcctaataatgctgaaacttcagaaccagcttgagtaaagcggaaaatattgtcaatgaataaaagtacatcttgaccttgttcatcacggaaatattcagccattgtcaatgctgataaagcaacacgcatacgcgcacctggcggctcattcatttgcccaaataccatggctgttttattgataacgccactatcgctcatttcatagtataaatcgttaccttcacgagtacgttcacctacaccagcgaatacagaaataccaccatgttcttgagcgatattattgattaattcttgaattaatacagttttacctacgccggcaccaccgaataaaccaatcttaccacctttaatataaggtgctaataagtctacaactttaatacctgtttcaagaatttctacttcagtagataattcatcaaaattaggttgacgacgatgaattggatcacgtctaacagaactatctattttttcgtttaaatctattgtttctcctaaaacgttaaacacacgtccaagtgtttcttcccctacaggaacactaatatctttaccagtattcacaacttgcataccacgttgaacaccatcagttgaatccattgcaatagtacgaacaacatcatcacctagttgcaatgcaacttctaatgttaatttaaatgtgccatcatttttgggtacttcaataattagggcattattaatttcagggacttcattatgttcgaatcgaacatcaattacaggacccataacctgagttacacggccattacccatgttgtttcctcctttaaaatattattcaagtgcggcagaaccaccaacaatttctgtaatttgttgagtgatttcagcttgtctcgctctattatattgtaatgataagtcatcaataagttcagttgcattatcagatgcatttttcattgcagtcatacgtgctgcatgttcactagccttagcatcaagaatcgttccataaattaaactttcaacgtattgtggaagaataactcttaagattgagtctttatctggttcaaattcatatgaagacatttgaccttggccttgactagaatcttcttgagataatggtagaacttgtttaacagaaggtttattttcaagaacactaacatagtggctataataaatcttaagttcatcaatatgttcttcactgaataagtcaatcgcatgcttagcgatagcttgtattgatttaaatgaaggttgatcaggtacatcaacaagtgaactttcaacttcataacctctatttttaaggaaatcaacaccggattgacctaaaacaataatgctatattcatcactatttgtatgtttttctttaatgtcattgactagtcgcttaagcacattcgaactataagcacccgctaatcctttgtcacttgtaataaccaagtaaccactacgttgaatatgtcttggtcttaacattggatgatttgaatttttacttgcgcctgcaatagcagttatcgcatcttgcattttttccatatagggttcgaattgcttagtatttttttcagctcgacgtaatttagaacttgaaaccatgttcatcgctttggtaatctgtttcatttttttcgtcgatttaatacgactatctatctctttaagagaagccattatctcaccacctttttgatttaaagtttagttattcagatttgctaaaacttttcttaaattcattaatagctgattcaaatttagcatcatctggaagattaccagtttctctgatttcccctaataattctgaagcatttgatttagaccaactatttaattcatcttcaaaacgtgtaatgtcttctacagggatatcatctaaataaccttttgttaaggcataaataattaacacttgattttcaacaggaagtggcttgttttgatcttgttttaaaacttcaaccgtacgtttaccacgttctaattttctagcagtatattcgtctaaatcagaaccaaattgtgcaaatgattctaactcacgataagatgctaaatctaaacgtaatgtaccagcaacttttttcattgctttaatttgtgctgaaccaccaacacgtgatacagactgaccagcattaatcgcaggtcgtacacctgagaagaataaatcagattgtaagaaaatttgtccgtcagtaattgaaatcacgttagttggaacatatgcagagatatccccagcttgtgtttcaatgataggtaaagctgtaattgaaccgccacctaatgcatcgtttaatttagctgctctttctaataatctactgtgtaagtagaagacgtcacctggatacgcttcacggcctggaggtctacgtaataataatgataattcacgataagcagctgcttgtttagttaaatcatcatatacaacaagtacattttttccattaaacatgaactcttcacccattgtcactcctgaataaggggcgatgtataataatggtgctggttccgctgctgatgcagatacaacaactgtgtagtctaaagcaccagcttgacgtaatttttcaacgtttgcacgtactgttgaatctttttgaccaatagctacataaatacaaattgtatctaaacctttttggtttaaaattgtatcaataccaatcgttgttttacctgtttgtctatcaccaatgattaactcacgttgtccacgaccaattggtactaatgcgtcaatcgctttaataccagtttgtaatggttcatcaactgatttacgatccataacgcctgttgctttttgctcaacagggcgtgtcttagtggaattgataggaccttgtccatcaattggttgaccaagtggatttacaacacgtccgataagttcttcacctactggcacttccatgatacggccagtacgtttaacttcgtcgccttctctaatttcactataaggtcctaaaattacgacacccacatttgattcctcaaggttttgtgctaaaccaagcacaccgtttgaaaactctacaagctcaccagccatacaatcatttaatccgtgaattaatgcaataccatcaccaatttgaaggacggtacctacatcatcaacagacatttctgactcatagttttcaatttgtgagcgaagtaatgcactgatttcttcagctttgatggccatctatgtcactcctcttttttaattaactcttttaaatttacgctctatttgttctaaatcattttttatactaccatctaatacagtagtcccaacttttgctctaaacccgccaattaagttaggatttattttagttgtaatatgtactttagacaatttagttttgttaagaattactctttcaatatgagataattcttcttcattcaattgatatacagattcaaccaaagcatcaccttgattataatgatggtcatacaaatgtttaaattctttaaagatagaatgtataagcgctaaatgacgattatttgctaaaatcattagcatattttttaagtaatagttcgcatccccaaatacaatacctgcaaatttacgtctttcagaagcaggttgattaggatttgaatcaattgcttttaaatcatcaatgtaatttaaagttgcattactaacttcttttaattcttcatacattaaatctaatcgatctttatctatagagacatcaaataaagctttagcatatttttttgctacatctgccattatttatcgcctgcctctttaagatacttatcaacgagacctttttgatcttgttctgaaatctctttttgtaaaactttagaagcaattaaaacagataactcagaaacttgattattaatatctgcaagagcgcgttctttttcacttttgatttcactttgtgctgtttcaatcataccatttgcacgttcatgtgcatctttaataatttcttcatgttgtttacgtgcttgaattcttgcatcttcaagaatatgatgaacttcatcttgtgtttctttaagtgtctttttattttcttcttcaagtttttgtgcattcaattttgcttcttcagcttcgtcaatatctctattgatatcgcgttcacgtttatccattacttcttttaatggaccccaagcaaattttttcaataacgccaataggataataaatgtaataattgtaacaattgttgttccccattcaacgccacctgcagctgcacctaaaacaaatgaattggttaatgcattcactggcatttgacactcctttcattattaatcatcactttgccactaaataaaacgaatggcgaagatcaaagagacttcgcctcgaacatttcttatctgaataatgtcatgaatgagataacaacgccgatgattggtaatgcttcaactaaaccaataccaatgaacataatactcattaattgaccacgtgcttctggttgacgtgctacaccttcaactgttcttgaaacaataagaccgttaccgataccagcacctaatgctgataaaccgattgcaattgctgctgcgattaaacccatattaataattcctcctaaaatgtttgtttatgttaatgtgcgtccgcaactttatgggacatgtaaaccatagatagcataataaagatatatgcttggattgtaccgacaaagattgagaatccttgccatataattaagccaggaatactaattatccagccccagccgttttggaaaaacaggccagctaatagtgataatagtaactcaccagcaaaaatattaccgtaaagacgtaaacctagtgttaatgttgaagagaattcttcaaagacattaataattgctaatggccagaaaggtttaaagtaattaccaacatatgcctttgttccacgcattttaacaccataataatgtgttaataaaatcatcatcgtagataacgtcaacgttacagtcgcgtcagcagttggagatttccaccataaataatgatcatgtgtaacaattgcaaatggtaaacctagcatattggcaacaaaaataaataaaattaatgttaccgccaagaagtgaaattgaccaccttttttccaagccatgttactctcaataatgcctcttacaaaatcgaaaatccattcgataaagttttgtttgccactaggtcttttcttgagattacgcgtacaaacaatagctattataaaaacaataatagcagtaataataagcatcataatacttgctaagttgaaaacaatatcaaatccaaacacattccaacttacgagtggggatttgtgatccatgtactcacctctttctgtatatagtttactattttagcaagagagggcgtaaaatgattaatacataagaaatcataaggcctatcattataccaatgatatttacattctctttaaagacaacccatactatacatgcaataattgcgactaagtatctccatacattgcctgtagaaatatgtatattatctggttgttttgtcctagaaagatatatctcaaaaatgtatgtgttgattagagacccgagtgtcccaattattaagcctaataaaaaagaattagatttaataaaatacaaaatacttaacattattaaaaaataaatgtaatattgaatgaattgtctaaatatgatgctgaaccgtttcattctttgtgcctccaaaacttatgacaatcatggaaaccgttccactcatacaaatttaataataatatagggtaatttatgtgtcaattctattcaaattgttgtttaatttaacaccaatattgtcataaaatgttcacaattaaatcaacaattttttaacttttcaaattctttaggtatttcttcggttaatcctaaatagtatttaatgctttcacatatacgttcagatgcctttccatctccataaggattttgagcatatgccatattattataaacttgtttgttcattaataattttcttatttcttgatacacatgtgtatactctgttccaattacttttaatgttccagcttctacaccttcaggtctttcagttacatctctaagaactaaaactggtttatttaatgatggtgcttcttcttgaatgccgccagaatcagtcaaaattaaataagcatgattagcaaaattatgaaaatcaacaacatctaatggttcaataagctctacccttggatgtttttctaagtaagcgtatgatagttttctaacttcgggattcatatgtaaaggaaaaactactaccacgtcttcaatatcttcaacgatatctctaactgctttgaaaatatgttccataggttttccaatattttctctacgatgaacggtcagcaatacaatttttttatttttatgcttttctatcaactcagaggtataatttttattaattgtaaaatttagtgtatcaatggcagtattgccagtaatcactatagatgtcttatctttattttcttgaattagattgtgttttgcaccaatagtaggagcaaagtgtaaatcggcaatgttactaaccatctgtcgatttatttcttctggaaaaggcgcatatttattcccacttctaagaccagcttctatgtgtcctacagatgtatgattataaaatgctgctaatgcgccagaaaaagtagtcgtggtatcaccatgaacaagtaccatatctggacattcttttttcataatttgctcaagttgaataatagatctagctgttatttctgaaagagtttgcccttttttcatgatattcaaatcataatggggtgttatgttgaatgtttttaaaactgaatcaagcatttctctatgttgagcagttacaacaataattggttctagcattgaatctttttcaagtgctttaattaaaggtgccattttaattgcttctggtcttgtaccaaagactgtcataatctttctcataatatttactcctatagtactatttagtaccaaataatctatccccagcgtctcctaaaccaggtgtaatatatgctttttcattaagtttttcatctaaagctgcaatatagatatcaacatctttatgcgcttcttgcattttttcaacaccctcaggtgcggcaattaaacacataaaacgaatattctttgcacctcgattttttagtgaattgattgcttcgattgctgaagcgcctgtagctaacattggatcaactactataatttcacgctcatcaatatcttgaggtaatttagcaaaatattctactgcttttaatgttttaggatcacgatacaatccaatatgtcctacacgagcagctggaactaagtttaatacaccatctgtcatccctaagcctgctcttaaaataggtacaattgctaatttttttccagctaatcgtttggctgtcatagttgttacaggagtttcaatttctacatcttgcaattgtaaatctcttgtaacttcatatgccattagcatacctacttcatcaacaagctctctaaattcttttgttccggtatttttatcacgaatgtaactcaatttatgttgaatgagtgggtgatcaaatacatgtactttactcataattcatttcctccatttatgttgttattcatatagcggatattgttgagtcaattgttttactctatcactagcttctttcaattttgcttggtcatttgaattttttaatgctgtactgataattaaagctacttctttaaatgctacttcatcaaaaccacgcgtcgttgcagcaggagtgcctagtctaattccacttgtaacgaatggtttctcctgatcaaaaggtattgtatttttattacatgtaataccaattgaatctaatgtttcttcagcctgtttaccagttaaattaactgattgtttcacatctactgaaactagatgattatccgtacctcctgaaacaattctaaatccttcatcttgaagtgtttcagctaaagttttagcatttttaatgacttgttcttgatatactttgaaatctggttctaaagcttctccaaaagcaacagcttttgcagcgatcacatgttctagtggtccaccttgaattccaggaaatattgtcttatctatctcttttttatatttttctttgcaaagaattaggcctccacgtggtcctctcagcgttttatgagttgtactggtaacaaagtcagcatattctacaggattaggatgtaatccagttgctactaaacctgcaatgtgtgccatatcaaccattaatttagcaccaacttcatcagcaatttctttaaatttcttaaaatctaattgtctagaatacgctgacgtaccagctacaattaatttaggcttatgtttcagtgctaattcacgaatttcatcataattaattctttcagtttctttatctacaccataatcgataaagttataaaacttaccactaaaattaactgaagcaccgtgggttaaatgaccaccatgacttaaattcattccaagcacagtatctcccatttctaaagcaactaaatacactgccatattagcttgcgaacctgaatgtggttgtacatttgcatgttcagctccgaataaagctttgatacgttcaatagcaattgtttctgtaacatcaacatattcacaaccaccataataacgacgacctggatagccttctgcatatttgtttgtcattacagatccttgcgcttccattatcgcttctgaaacaaagttctctgaagcaatgagttcaatattattgttttgacggttatattcattttgaatcgcttcataaataatgtgatcttgttctttaatataagacatatattccccttcttcctttagaacttattcgtatttagctctttctccaccaattttttttggtcttgaagtagcgattgtaactatagcttcaccaacttttttaacgcttgttctcaatggaacacaaacatgattaatgtgcattccaataagcgtctgaccaatatcaatacctttaggcacttttatatattcaatgactattggatcgttcatatgttgataggcatatgtagcaagacttcctcctgcatgaacatctggtacaacagttacttcttccatagtaaatggattataatcttcacgctcaattgtaatcgccctattgatatgttcacaaccttgaaacgcaaatgaaacgcccgtttcacgttttatacgttctaattcattaaaaatagtttcagcgacttccattgaaccaactgacccaattttttccccaattacttcagaagttgaacatcctatcacacacatctcatctttcttgaaaaaagattgggatttcaattcatccagtaaagttgtaagttcttgcatattatttcacctcacttgcaaagataaaaagaagcatagctgacaagctatacttttttattataacttatttattactcaacttatactattagcgtaatatttctctttattcttcgtgtttcaatttgttaataagagcgtataattggttaaatgtgtgacgataggtatctatgctaccgccaaatggatcacctatttcacctgtttctgatacatactcacataatgtatagataggatattctgtcccatattgactgattaactgtcttttatgattatcggtcattgttaaaattaaatcactttttaagtcatcttgactgaatatttgagatacagagggttctggtaaattattttctaaaataacttctaatgcttcaggagtgatagattgtccattcattgcaaataatccacgtgattgaatagaatcgttaggtagaagcactgtagctatactttctgcaataggacttctacacgtatttccagtacatacaaatattatcttcataattctcttcctttaactatttgatttcccgttgctttcatcatacgattcataactgcttcagagccttcaatattatcaaaagtataaataaatgctttttgtattcgttcatcatcatcaatgtcatgtaaaattttatataagttatgattagcccctttaacatctctttgattttcacaaagagagataaatgtacaatctttaggtacatactttttcatactagaaggtaaaacaaatgctaaccctgattcatttaactcagaaataggttgtgtaaattcagttaacatatatacaggtgttttaggtgcatagtgtttatatttcatacctggtgctatgggccgttctaattgattataatcatattgaatgacgctgtgaggtaccacgtgattaagcattgtttgagtaattgagcctggtcttgctattctaaaaggaaattgtgtgcaatctaaaactgtactctctaagccttcttcactttgatccccatttacaataccatctatttttccatttaaatcattatacacatgctgaaatgtcgttggagaaggtcttccacttatatttgcactgggtgctgcgattggcaaatcaacatattctaatatggctcttccaattggatgacttggcattcttacagcaatagaattaagcccacctgtcactttctcacataagtatccttgttttaaaggaagaataaacgagattgggccaggccaaaatgcattcattaatttttgggcttccttagggatagtggatacaaatgcatccatttgtgattgcttgtaaatatgaacaatcagtggattatcagacggacgtcctttagctttataaatgttttctactgcctgttcatttttagcattggcacctaaaccgtatactgtttcagtaggtatcgcaattaggcccccattttcataaatagtttttatttctgctaattgagaaaacgtttgggaatcttgactataatctttcatattccatatttttgttttcattttgatcacacctttcacatatgtgaagttattaaagaaaaagaagtgggttagaaaataatacatttctttcccactccactattaccacttaaatgaaatcattctatttaatccgttaatatctttcaagagatttacattaacatgcggatatttatttataatacgtgcttttaatatttctccttgattataaccaatttcaaaagttacataagcccctttattaagtactttgggtaaatcatctagaatcatctcataaatctcatacccttcatcttcagcaaataacgcgatatgaggttcatactttactactgtatcttccatatctttcatctcagtttgatcaatataaggagggtttgatattaagccatctaatttaatattttctttaataagtggtttaagggcattaccttttagaaatctgatatccgcttttaattgatgtgcattatcagatgctacctctagagtatcttcaataagatctgtggctattacatttaaggttggatttagttttttaagtacaattgcaatcgctccactgcctgttcctatatcagcaattgtactcccatccttacaatgctctaaaaaatgaagcatgacttcttctgtttctggacgtggaataagacaatgagaatttacttgtaattgatatccataaaatgattgaaaaccaacaatatattgaatgggctctcctaataacatacggtctaatgcaagtgaaaattttgcttcttcagcttgagacatctcatcatacatatgcattaaataatctgtcctagaccattcaaataagtctaacatcagccattccgctctagattgttcaaatcctttttcttttgttaattcaattgcttcttgtaaggtatctttaaagctcgccattatttagttctttcagtttttcagtttgctcagaaagtgttaatgcatcaataatttcatccaatttaccttccataatttggtcgagcttttgtaaagttaaaccaattcgatgatctgtcacacgactttgaggataattataagttcttacacgttcagaacgatctcctgtccctacagctgatttacgttgagccgcatacttttgttgttcttcttgtaatttcatatcatataatcgcgcttttaatacttttaatgctttttcacggttttgaatttgtgatttttctgaagacgttgcaataataccggttggaatatgcgtaatacgtacagcagagtctgtagtattaacgtgttgaccaccagcgccacttgaacgatacgtatcaattttcaaatcttcattacgcacttcaatttctacatcttcaacttcaggtaaaacagctacagtcgctgtagatgtatgaatgcgtcctccagattccgtttcgggcacacgttgtacacgatgagcaccattttcaaatttcaacttactataagcaccactacctgaaactgaaaaactgatttctttatatccaccatgatcactttctgccgcttcaacaatttcagttttaaaattttgagattccgcatattttgtatacattcttaataaatcgcctgcgaaaatagctgcttcatctccaccagctgctgctctaatttcgacaataacgtctttttcatcgtttggatctttaggaattaacaagaatttaagttgttcttctaattctggaagttcaccttttaatcctgatgcttcttcttttaacatttcaatttcttctttatcatctgtttcagttagcatttcatctatttctgctacttcttctcttttacttttgtaatctctataaacatctactgttttctgtaaatcagcttgttctttagaatattttcgtaatttatctggatcattaacaatttctggatcacttaacatttcgtttaactgttcatatctttcttcaacaatatctaattgatcaaacactatatttcctccttgtcattgatgctaggtgctacaatatgatgtgctctgcatcttggctcataactttcatttgctcctactaatataattggatcatcaattcttgctggttgtccattaattaaacgttgcgtccgacttgatgacgaaccacatattgcacaaacggcttgtaatttggtcacttgttcacttacagccataatttgaggcatggggtcaaaaggttcacctctaaagtccatgtctaatcctgctactacaactctatgaccatcttcagctagcttttctactatatgtacaatttcattatcaaaaaattgaatttcatctatacctatgacatcaaattgagataaattttgtaatagtatttctctagctgttgagatattaatggcttctagctcattaccatcatgtgatacaactttctctttatgataccggtcatcaatagctggtttaaatacgattactttttgtttagcataaattcctcttcttaatcgacgaattaattcttccgatttaccactaaacatacttccagtaatgcattcaatccaaccagaatggtaagtctcatacattataagttccacctttttcaaaacataatcgcttaattatatcatattttcgattattataaatgagtttattactgggttatcactgaagaaattaataaaatagtttagaaataaaaaaatacctgcttaattctatacataatagattaggcaggcattttaagttcaaaattaattgttgtttgatttgagaccaaactttttgttgaaacgttccacacgaccatccgcagcagcgaatttttgacgtcctgtgtagaatggatgtgaatcagatgatacatctaagcgaataactgggtattcgttaccatcttcccattccattgtttctgaagaagttttagtagaaccacttaaaaatttaaagttcgttgttgtatctaaaaagatgactttgtggtaatcaggatgaattccttgtttcatttttttcagctcctttgccctgaaccatctggaacagagttatttgtgagtttttacccaatactgtgtaattataatagttattgaaggaaaacgcaaccctcaatcacatattttagataattggttttcctgtttttgtactttcagcggctgccttttgcaattgttcaaaaaattctttgttattttctgaacgttttaattttcttataaaacgctctgtaaaatcggtagaatcagtaaacatatttctaagttgccataatgactctaattcagacttactaattaataattcttctttacgcgtagaactacgcccaatatcaatagctgggaatattcgacgttcagataatttacgatcaagatgaagttccatattacctgtacctttgaactcttcataaatcatatcatccatacgtgaacctgtatctactagagccgttgctaaaatagttaggctaccacctgcttcaatattacgagcagcaccgaaaaatgctttaggcttatgtaaggatgctggatccaagccacctgacaatgttctaccactaggtgggataacaaggttatatgctcttgctaaacgcgtaatagagtccatcaagataatgacatcttgtcctatctctacaagacgttttgctctttctaataataattctgctaccttaacgtgatgttgaggaggttcatcaaaagtggaatgtactacttctgctgactctactgaacgctctatatcagttacctcttcaggtcgttcacctactaataatataaataatttagcatctggtttatttgtactaattgcatttgcaatttctttaagtaatgaagttttaccagctttaggaggagcgacaataagaccacgttgacctaaaccaattggagtaactaaatccataattcgagtagaataatttcgaggctctgtttcaagaataattctttcctctggatataacggagtaagtgcttggaaatgaggacgtttttttacaacttctgcattttcatcattaacaaagtcaacttgtagaagtccatagtatttttcattgtctttaggctttcgtacttttccagttactttatcgcctcgtttaatttcaaaacgtctaatttgactagctgatatatatatatctttttcacctttagaataattaacggttcttaaaaaaccatatccatcaggttgtatatcatctaaaacaccctccatatagtaatttccatctttttccatttgagcttccataattgccaagacaagctcacttttattcaatttactataattagttagttttaatgattttgctttttgcgtaagttcttttgtcgtataatttttatacaattcatgaaaagattcatattgtggtgatgttcgttctctttcaggcataaattgcacccatttcttatatttttataaaaatcatctagctactagcattgttaaatcatctaaatgattataacttaaatgttttaaacgttagcatcttaaatactagaattaatatagcaaatttttaatttaattacaaaatgattttattaaatttcaaaaaataaaacagctcatggaactaaaatgattccatgaactgtatttatattaaactatttcattatacttaattatttaaaataaccagcaattgattttacttctaagaactcttcaattccgtagtcgccccattcacgaccgataccagattgtttataaccaccaaatggtaaatagggttcgtttggagattcattaatttgaattctacctgcctcaattgaacgtgccactttttgaagcgtttctttatctttaccaattacatatcctgctaaaccatatttagtatcattagcaatttcgattgcttcgtctaaatcattatatgtgattactgaaacaactggaccaaaaatttcttcttgtgcaatagtcatatcatttttaacatttataaaaatagttggtctagcaaaataacctgtatctaatccttctggtttacctggaccaccatataataattcagcgccttcttcaatacctttatcaatataagattgtactgtgtcgaattgttttttactaatgattggtcctacttgggtatttttatcaagtggatcgccaactttaacattactaaactcttcttttaaggcagttaagaattcttgtttaatactttctggaactaagattcttgttcctgcagtacatacttgaccagtattattaacaacctttccagttgtagcttttgcagcttctttaatatctacatcgtcaagtacgatatatggtgatttgccacctaattcaagagatacttttttgatatctttagctgctttttccataattttagaacctgtagctccagaaccagtgaatgacatcattctaactttaggatgttcgcttaatggattacctacaccttcaccatcaccattaactaagttaaatgcgcctttaggaacgcctgctttttcaaagatttcagctaaaattattgcagcaaatggtgtttcttcagaaggttttaacacaactggactacctgcagcaaatgctgctgctaatttaagagatgtttgattagttgggaaattccatggtgtaactaatccagaaacgccaatcgcttctttagttaccaaatcatctccgcgacgttcttcaaattcaaatgaatctaaagctctacgtgcttctgaaaagtgttgtaaacccatttgataatgaacattttctgaaacagttagtggagcgcctaactctgctgtaattgcttcaataatatcttgttttctatttttatattcttctactattctatctagtagttgttttctttcttcaactgaactatggcgaaattctaaatatacgtcatgagcagcttgaaccgctttttctacgtctttttcattaccttttgcaacttttccaataacttcttctgttgctggattaattacatcaattgtttcgttactttcactatcaatccattcaccattaatatattgttgagtataatttctcatcaatgattcactccttaagaatgtgtatgtctaatatatatccgatttgatgttatttaaacataattaaaaggttaaagtttatataaactccaaccttttaactatattatttaactgaatcgttatgttctaatgtgacgtaatctctagcccatgcttcaattggtcttaaagcctcagcaagtgcttttcctttatcggttaactcataaacgatagaaacaggacgtgtagaaatgacttttttgtctactaatccccactcacctaattctgtaagcttaatacttaatgcacgtggagtaattgtttttaaatcccttttcatatcggaaaagtgtgcagtataatcagcgcatcgagataggtaattaatgattaaaccgttccaacttctaccaacaattttaaaggtttcttcgagatatggacagatttccattgtcttcacctctattcaaaacttcttaaacattgcaggtatttaatatacttcagcaattaatatatttaagtatatcaaaaataattaaacttgttcagtccaaatatccgcacctaattctttaagatgtttaacgatatctgtatatcctctataaatatgtttaacattataaattgttgtaacaccttctgctagtaatccagcaataatcaaacaagctcctgcacgtaaatcactcgcatatacttcggcaccttgaagtttagaaggtttaattgttgcagtaccagtagacgtatctgcttcaatactagctcccatatttttgagctcttctacatgtcggaaacgagctggatatatcgtttctgtaacgaaagaaggaccatctgtcataaataataaaggcgtaataggttgttgtaagtcagtagcaaatccaggatatactaatgttttaatatctacatttttatatgatgatttacctttaattactatttgttctttatcatcatcgatatcaatatcaacgcctaattcatttagtttaactgtgagggcttctaaatgtttaggtacaatatttttaattgttacttcttcaccacaagcagctgcaatacacatatacgttcctgcttcaattctatcaggaatcacttgatattcggctccatgtaactcttcaacaccactgatttttagagtactcgtaccggcgcctttgatatttgcgcctaagctatttaaaaagtttgctacatctactacttctggttctttggcagcattttcaatcgttgtttgcccttttgcatgaacagctgcaagcataatattgatggttgcaccaacacttaccatatctaaaaagatgttggctccgtgcaattcttttgcttctattttcattgatgtatcacttgattcatcaatttcagcacctaaagctttaaatcctttaatgtgttgatcaattggacgtgggcctaatggacaaccacctggtaaaccaatcacacattttttaaatcgacctaacatggctcccatcatataataagaggcacgtaaagattcaactttattatttggtaatggtgcatttttaatttctgatgtatcaacttctaatgttttaccattaagatttgttttaatatttaaatcttctaataaactcacaagtgtttcaacatctgagatttgcggtaaaccgtcaattttcacttgtccttgcgctaataaagtagctggaataatagctacggcactattttttgcaccactaattgtaacttcaccctttagtggttgaccacctcggattttaattacttcttgactcatttattttttctcctttatcgccttttgtaaaattatacataattcgcattataaattatatattatttatttgtaaaacactaacttttaaaaaaatttagcaattataatattaatattaatatctaaaaatctaataattcatataacggattgataacactattataaatcaatttatacaattaattaattctgttttttcataaattttataaaaagttaatttaatttttatacatcgtgagtcagtcattgagtaacactccgcacgactaactttatacaaatactttaataatatatcgtaaaattttgtataaaataaaaaaactgtcaacaaagcgatcactttgctgacagttaaggttgccttaacctttaataatctttattttatttagcacgattagacgtaccaaactctctaatcttgccttttactgtttctttaatagcttcacgtgctggacctaagtatttacgaggatcgtaaacttctttatcattgttcaatacatctctaacagctttagctgaagcaatttgattttcagtatttacattaatttttgcagtaccataagggattgctttttgaatatctttagttggaatacctgtaccaccatgtaaaacaagtggtaagccagttgatgcaccaatttcttccatttctttgaagcctaatttaggttcgcctttataaggaccgtgtactgaacctaatgctggtgctaaagtatcaataccagttctttcaactaattcttgacattctttaggatcagcatagatgataccgcctacaacatcatcttcttgtccacccactgttcctaattcagcttcaactgacacgccatgttgatgtgcatattctactactttagaagtaatttcaatattttcttcaaatgggctatgtgaagcatcaatcattactgaagtaaatccagcatcaatagcttctttacacttttcaaaacttgaaccatgatctaggtggatagctactggtatagtaatatttaaatcatgcattaaaccttctaccattttaactactgtataaaaaccactcatgtaacgtgcagcaccttcggaaacacctaagataactggcgcgttctcttcttgagaagcttctaaaatagcttgtgtaaattctaagttatttaagttgtattgaccaaccgcataaccattttctttcgcatcgattaacatttccttcattgaaactaatggcatgaaagttcctccttgtatccaattacataaattttcaaaaattattatagcagataatattttttattgcatgcttaatttaaaaataagtgataacttttgaagcttcattgcataaaatatcatatttcattacaatactaatgaaatggaggataatcatgtcaaagatactacaaacacaattaacgggtgtattcaatcgtttagaagaccaggcgttagatatacaaatggctgctcaatgtttaatccaagctattggtggagaagggtatgtatatattaatggttatggagacttaaaattctttgaaacttttatattagacagtgatgaaaaattaaattctagtaaaaaattgagtgaattaaacagtttaaatgacttagacacaactgaccgtgtatttttattctctcctttttataccaaggaagttgctcaagatgttcaacaattaatagacaaagatattgattttgtattagtatgcaatcgtcctaaacaagaagatttccctgaacatcttatgcattttgtaaacttatcaaccccgcgtccaatcgtatatactgaggattatgataaaattgtacaacctcatacaatggcgtttaattacatttactatgatatatatacacagatgattgaaatgactagagacttggaattataaaataactttataatcattaatacttaacatgtacagcctttaacttctatataaattgatataaatgaagcggaatagactttaaaaagtagtctgttccgcttctattttgatattttaattttgttggtgtttataagcagcttctacaaaagctttgaaaatgggttgtggtctattaggtctagataagaattccggatggaattgacaagcaatgaagaaatcattttctggaatttctaccatttccactaaacgaccatctggactagtaccagaaaagaccattcctttatcttctaattgttctctataagtattattaaattcataacgatgacgatgacgctcttcaatatttgtttcattataaatatcatgcgccaaagtatgatctttaatagtacatggataaagacctaaacgtaatgtgccacctaaatcttcgatatctttttgttcaggtaacaaatcaataattggatatggtgtatttggatcaagttctgctgaatgggcatctttaaggcctacaacatttcttgcaaattcgacagttgctaattgcatccctaagcaaatgccaaaataaggtatattattttctcttgcatatttgatagctgaaattttaccttcacttgctctaaaaccaaagccaccaggaactaaaattccatccacatcacttaagtaactctctacattttcgtctgttacttcacttgaatcaatccattttactacaacatcttttttcaatggataacctgcatgttttagtgattcaaccactgacaagtatgcatcttgtaaacttacatatttaccaactaagccaatagtaattgtaccatctaatgaattaacggtatctaataaatattgccatttatctaattgtgtatcgtatttagcatctaaatctaatcgtttaattacaatatcgtccatattttgagcacttaattgtaatgggatttcatataatgacgatgcatctctacattcaataacactctctttatctatatcacagaataaagcaattttatcttttaaatcttgagtcatttcatattctgttcgaacaacaattaagtcaggttgaatacctaaaccacgtaattcttttacactatgttgtgttggtttagttttcatttctccagctgctttaatgtatggaagtaatgtacaatgaacatacataacattctcacgaccaaggtcacttctaatttggcgaatagcttcaataaatggaagagattcaatatcacctgttgtgccgccgatttcggtaatgactacatccgcatttgtactttctccagctaataataagcgttctttaatttcatttgtaatgtgtggaatcacttgaactgttccacctaaataatctccacgacgttctttttttagcacatgtgaatatacttttcccgcagtgacattagaatatttatttaaattgatatctataaaacgttcataatgtcctaagtccaagtcagtttcagcgccatcatctgtaacaaatacctctccatgttgataaggactcattgtaccaggatcaacatttaaatatggatcaaatttttgaattgttactttaagtcctctgtcttttaacaatcttcctagagaagcggctgtgatacctttacctaaagatgaaactactccgccggttacaaagataaattttgtcattgtctgacctcctaatttattaagggttgcttccttactctatctctacaaaatttaaacatttcctaaaaataaaaaaatcgctccctctcacatatttgtaaggggagcgtataacatttatacacgtgtcctaattaaaggagcccgaataaaattttaacatttttcattcaaaagtcaattaaaactaatatttagtcattaaaatcttctgcatcttcaaatgcttcttcttcaccttcagcgatgtcgtcatcatcatcttcttcaataacgatatctgaaccgtcaatatcttcttcattatcatcagaatcatctaatgtttcttgatcatccgtttgagctggaatatcatcgtcatcatccatttcatcgtcgccaagtaacttaagattttcatcttcttcatcatcgtcatcaagaatatcaaatttttgaattgttggtgcaattttttcttcaatatcatctactgaataccaatcacgtaatccccattgattttcaccaacgtttaagaaacgtccatctgtatttaaatcagtataaaattgtacaatacggttttcaatttcatcatattcataattaccaaggcttttaaattcatcaataatatcgtagagattcattgttgaccctttatcatgtaataaagtataagccatatcgataaatgatttttcatcaaccatttctttagtataatcttgaattttcattataactaaacttcctttcaaaggattttattatctttatattgcttttattaatagtaacaaagataaattataaatgacattttatgatttcgcaattgctattcaattagtaattaatatattttttgaaaataactaagtcatctgattgatctgtctcaacaaagccgctactaatacataatggcttaagttcattattttctccaaataatgtaatacctatacttcttatttctttaaaatgtttgcgtacatatgtagggagttgtcttaaagcactcccagcaatcccctcttttctttgatctttatatacttctattgcggcgatttttagatgggtatctagatgttcgagtgcaataaatccaactttttgatcatcttttaataaatcaataatttgatacatggcaatatttgaatctttattctcaactaatttcaatgacgatacatgtttagaatccaaatctaaatagtataaacgttctttaccgatgggtccttcttctttagtagctgtatgcatgaatccagcacgttcatatacattccaggccccttcattttcagtatcaacaactaaatataaatgattgaaatctggaaacaatgcttgaacatattgaggtaaatacatcatcatagttgtaccatagccttgtccttgaaacttttcattaatagacaatgatcgaacataaacgacatgctcaggtgtatcatatccttcatgttgataatattgatgaagtacgaagaatcctactacatctccattttcattaatggcaatattagctactcgattttcatcatttaaagcatcttctaatacagatttaggtaatgatgaataaatttgttgtcgttcacttaattcaaaatttaagacatcatcgcgatattgttcttcaaattcttgaattgtaatgttttcaaattgctttactatactcataaaattagcccctatatcacaaagttgttttaataatatcatatataacctttaaatcttataaaatgatctatttactctaatatttaccatttattttataatattgtaaaataattgcaattcgtcaaaattattatagtattaacttgtcatatattaattttagaggtgaaaaaaatgagagtaggtatcgatgccggcggtacattaattaaaatagcaatggaagatgatacacaccgtacattgtcaactgaattaacaacagatataaataaagtcattcaatggttaaaccaaaatgaattcgaaaaaatcaatttaacagggggtaacgcaggcgttattgctgaaaacatcaaacaatcatcccaaatatttgttgagtttgatgctgcttcaaggggattaggtattttacttaaggagcaaggccatcatattaatcaatacatatttgcaaatataggtactggtacatctttacattattataacggtcaccatcaagaacgtgtaggtggaattggtactggtggcggaatgattcgaggtttaggttatttattgactgaaatatctgattatgaaacacttacagatctcgctcaatttggaaatagagatattatcgatttaaaagttaaacatatatataaagattctgaaccgcctattcctggtgaactcactgctgcaaactttggcaatgtactaaataatatgaatgaacatgttactaactcagataaattagcatctgtagtaggtgtcgttggagaagtgattacaacgatggcgattacagtagctcgtgaataccaaacaaaaaatgttgtttatattgggtcttcttttaataataatcccttactacgaaaagttattgaggattatactgtcttacgaggatgccatcctttttacattgaaaatggtgcattttcaggtgcaatcggtgtccttcatttaagctaattcaaaccaaaaatattaacataaaaatcccaatagatttcttaaaaaagaaacctattgggatttgatttaaaatgataattcattagatactttttgtggagaaacaatggtacctacgactccaggttttaagtctactgcaacagcttgatcattatctcttaatttatcaagccattcactaaatacactaccttcgatttcgattaaatcacattcttcaaaatctttatcacgaacttttcgtgcccgatttttaatactccatacaggcataatattaggtttttgattttctttatcactaataagaataaatcttttttcccctttacgtgttaaaccaaaaacatgattttcttttgaaatatcttttgcaaattctttaagacgaattttgtctaattcagacatgagttcatccatcatgtctacaactttgacaatatgtccctcttctttaattgaagtattgattaaaattttatcactttcatcaaacaattcatccatatcatacgtaacgaacgtatcaatatcaatatttaatagtcgatcaaattgaatgtctgagtgatttaaatactcttttgcgatgtcttcattcgtccacatccctgtataatcaccatcttcatgatgaatacgagttaattttttatttttactagccaaaataatgacttcattaattaatatctctttgaaatagtcattatgcttatattccattgcaaaccctctctcttaatatactaattaaatgttaaattatattaaaattaacgtcaaacatctatattcttttttatagttaatttaacctatactctaacttaattagtatcatcaagttcactaataaatgcttgttctaattgttcaacttcttctttagaatcagcattccatatacatccaaagcgagatttcacttcatctttaccaaaccaatcaccgtcataatacgaaagaggataaagcacgccttgtttaacatattttaaaataacattgaaaaaaacgagtattatctcctcttgaaaaataactataaaatttttgatagttaggatttaattcatcttgcaatagtaacatgcttgtcgaaccattttgtctaaaattcaaatctatagcaaatacattatcattttcatctaataataaatcaaatcctgccacaccaataaagcctaagttcactccatttttcataatttcacgaccagcttgaatcactttttctggaacatcatgcacattttcatttcctgcgtatagaccatatttatcggtaatttgatgggcagtacctagataggtaatacctatttctttagaatatgcaaattggacacaataatttttaactgcttctattttttgttcaatgattaaattatcggtggcatgggccgcttcaaatattcgtttagttgctttttctaagtcttcgtcgttatagcaaatcattacgccatagccacctgcagttggtaattcatctcctggcttaattacaaaaggataatcccaatctttgatacgacctttgaagtctctaattgacacaatttcacgatccggtaaatatttatgatttgtccattcaggaatacgtgatttattatttaaagctacaaaaacgtctttatcaatggcatacgcttcgtcatctactatgtcattgttttcgatatattgaaaatatatttttttcccttctttattgataatctcttgtaacaagcgttcatacgtttcacgatttctaaatgtataaagatgctccggtatttttttaccaataagatcaaatagttgttgtaacttatctgtaatactcgcttcgtgtacaacaatcggcatatccttagcgataatcatttcacgaccagtcaaaaaattagactgatgttcttctgttgtgagccaaggattcaatgcataagaaggtcttgaattatatacaatattttcatcatacaaatcacttaacgttaactttggaacactatattcatttttcatttatttacccctttatttgagaatgttgctctacaacctcatcaaatagttttttattttcaattaattctagtcccataagagcaataatttttgcgcctcgaatcaaagcttgatcgccatgaacacttgcagctgcttctctaaaacggtgtgtatgacctactaaatttcttgagccaattttaacatgtggatgaatcgtaggaactatatgactaacatttcctgtatctgtcgaaccaaaaccaaaatcatcataacttacttcttcgccaacttctatggcgtatttttcaaataattcatctagtttaggtgtttttataaattcatttacaccattttgaataggaccaaattcatagtcacaacccgtttggatggctgcaccccttgcaatttgattaacacgttctgttaaaatatcaagttcttttctagtagtggcacgtgtataaaatcttgcatgcgtataatcaggtataatattagcagctttacctccatctaaaatcacaccgtgtacacgatgacttttcttaatctgttgacgtaattgagctacaccattgaaataagaaatcatcgcatctaatgcatttaaagcctcatccgcattttctgaagcgtgggcgcttttaccataaaatttaatatcaagcacatcaacggctaatgtatttatcgttggatatgtttcatttccaggatgaatcataagtgcaatgtcaatatcatcaatcacaccggcttttacatatgaagctttcgcacttccattttctccaccttcttcggcaggacatcctaatacaactacttttccaccaatatggtcgatgacttgtttaagtgcgactcctgctaatacacttgctgtcccaatgatattgtgaccacacgcgtgacctaaaccaggtaaagcgtcatattcagctaaatatcctatagttggtccttctttttcagactggtaagttgcaataaaaccagtagcatgtccggcaatatctgtttctatctcaaactcatttgctcttaattgatcaattaatgttcttgaagcaaatatctcttcattgcctaactcaggacgctcgtgtatacgatgacttatttcgacataatcgtactttttattctctatatagtctaatatctcttgtttactactcatcaatctatactccttttatacacgaatattaatatctatatttatttagacatcaagtcaatcaatttcttgatgtatcattaaatttaattattacttattttatcggatttactatagattgtcattaaattcgtttgaatttacaaaattttcttacaataagtatttaaatcacttaattaagaaaattgtaaatgattggcactcttgttacaatcatattattcaagcaatgtatttataggaggaaataaaaatgactaaaatgaacgttgaaagttttaatcttgaccatacaaaagtagttgctccatatattcgcttagcaggcacaatggaagggattaatggagacgttatcaaaaaatatgatttacgttttaaacaaccaaataaagcgcatatggatatgccagcgctacattcattagaacatttaatggctgaacatatcagaaatcattctgataaagttgtagatttaagtcctatgggttgtcaaactggtttttatgtttcatttattgatcacgatgactacgaagatgtattaaatattgttgaaaaaactttaaatgatgtgttagaagctacagaagttcctgcttgcaatgaagttcaatgcggttgggctgctagtcattctcttgaaggtgctaaagcactcgcaaaagaattcttagataaacgtaatcaatggaacgacgtttttggtgaaggcaaataattaataattaaataaaccataccctacctaaatgctttaggtagggtatggtttatttaaattttattataatttttttacgatagctattaaaatgaattgaagtggtaatcttaagtataatgcccacttaggaacagatttatttcctaatggtaattgctttcttgccatgtaaatgtttgctggtaaaactgcaagtaaaaatgcattaataccttttttcaaccaatccgcaggtcttttggctaataacataactccaaagaacatttcaaatacgcctgtcactaaaactgctgtttttcgtaatggtaaatactccggtacaatcgatctaaattgacgttcatttgtaaaatgtagtattcctgctgatccaaatgctaaacctagtaaatatctcattattttcataattattcaactcccatttcttttaaataactttttccgtattttggcaattcaacattgaaattatctgctattgttgcaccaatagaactaaatgttgtatctcctgataattcatggtatgcatctattttagggctaaacataagcactggaatatattctcgcgtatggtcagtaccctctgcaattggatcattaccatgatctgccgtaataataactaaatcatcttcttgtaaatgatcaattaattctggtaagcgttcgtcaaaatctttaatggcttgtgcataaccgtctttgtctctgcggtgaccatataacgcatcaaaatccactaaattcaagaagctgataccattaaagtcctttttaacgacattaatgagctgatccatgccatccatattatttttagttcttattgcttctgttacaccttcaccgtcataaatgtcattaattttaccaattgcaataacatcatagtcatgatcttttaatgtgttcattactgttttaccaaatggtttaagtgcataatcatgacgattagacgtgcgtgtaaagtttcctggttcacctacatatgggcgtgcaataacacggccaattaagtacttaggatctttagttaattcacgaaccttttcgcaaatatcatacaattcttcaagtgggataatatcttcatgtgcagcaatttgaagtactgggtctgcactagtataaacaattaaatctcctgtcttcatttgatgttcgcctaattcatcaataattgcagtacctgaagcaggtttatttgctacaacttttcgacctgtcatttcttcaatctcttgaattaattcatcaggaaatccatttggataaactttaaatggttgcatgatatttagtcccataatttcccaatgtcctgtcatcgtatcttttccaacagaagcttcacttaatttagtaaaaaaagcacctggttgttcaactttattgaccactggcaaatcttcaatattacctaatcctaatttttctaaattaggtaatgattggttaaaaccttctaacgtgtgttttaatgtgtgtgaaccttcatcattaaaagctgcagcatcaggtgcttcaccaatacctactgaatccatgacaattaaatgcactcttttaaatggtgtcgtcatatttaacactcctactctgtaattattttatgaattaatgttggtgtttttgcttgcgctttaatttcgatactttcgtcaagtttcttaattacatcatcaacattttcacgattactgtgaatcgttaataaagactctcctacattgactttgtctcctactttcttattcaacacaatgccaacacttaaatctatgtcatcgtctttcgtttgtcttcccgcacctaacatcattgaagcaactccaatttcattagcaataagctctgaaactacaccacttgattttgctttataatcaatttgatattcggcagtcggtaataactccggtaaattgacaactgaagcatctccaccttgattttctaaaaatgttttgaatttatctaatgctgaaccattttcgatggcttcattgagcaattgacgcgcctcttcaagtgtatttgctctttcagcaagtacgaccatttgtgaaccaagcgttaacactagttcagttaaatcttcaggtccctgaccatttaaggtatcaatcgcttcttttaattctaaagcattcccaatcgcacgaccaagtggttggctcatatctgaaataatagccattgtatttctcccaacattatttcctatgctaaccatagcatgtgctaaagcctcggcgtcttctaatgttttcatgaatgcaccatttccagttttaacatctaggacgattgcatcagcacccgcggcaattttcttactcatgatagatgatgcgattagaggaatagagttaactgttcctgtaacatctcttaatgcgtatagtttcttatctgcaggtgttaaattgccagtttgtccaatcactgcaacttgattttcattaacaagtttaatgaagtccgcttcagagatttcaacatggaacccatcaatagattctaatttatcaatcgtaccacccgtatgtcctaaaccacggccactcattttggcaactggcacttccactgcagctactaatggtgccaacactaatgtcgtcgtatctccaacgccaccagttgagtgtttatctactttaataccattgatttttgataaatcaataacatcacctgaattaaccattgccatagttaaagctgcacgttcttcttcattcatatcttggaaaaagattgccatcgctaaactagaagcttgataatctggggtatctccattggtatatccttctatgaaaaattcgatttcttctttagttaatatctgtccatcacgctttttttcaatgatgtctaccattctcattgtgctatcccctttctcggttgttgcatttctaaatgatgttaaaaaacatactattaataatcagaatttgattctaaacctttgataatttgaacaccagcacttgctccaatacgtgtagcacctgcattaagcattttgtgaaaatcttcaagattacgcacgccacctgaagctttaacctctaattcgtctcccacagtgtctttcattaatttcacatcttctggtgtagcgcctcccccagcaaagccagttgatgttttaacgaaatctgcaccagcagcttttgctagttcacttgctttcactttttcatcgtctgttaaaagaatagtttcaataataactttcactatttttccgttagctgcgccaactacgccttcaatatctttttgaacatcttcatatcttccatctttaagtgcgcctatattgataaccatatcaatttcagacgcgccatttttaatcgcatcttctgtttcaaaaatctttgtagcggttgttgtagctccaagtgggaacccaatcactgtacatacgagtacatcagaattcacaagttgttcagaagcatacttaacgtcggtcggattgacgcaaatcgatttaaaatgatacgccttagcttcagaaataattttatcaatctgttgacgtgttgattctggttttaaaagtgtatgatcaatatattttgaatattccataaaaatttcctccaatgtattgctcgaaagccaacttatactaacataatttatatgtttctctcatttatatagtacaaaaattcgcaaaaattttaaacaaatgttatctttattttgaataaaatgttaaggagaagatattcatgacaaacggtacacctcatattcaacctaatggagctaaaattgctaaaacagtattaatgcctggagatccattacgtgcaaaatatattgctgataactttttagaaaatgttgaacaatttaatgaagtacgtaatatgtttggatacactggcacttataaaggtaaagagatctcagtaatgggttcaggtatgggtattccaagtattggaatttattcgtatgagctttataatttctttgatgttgatacaattattcgaataggttcatgtggtgcattacaagagaatgtgaatttatatgatgtcattattgctcaagctgcttcaactaattcaaattatgtagatcaatttaatattcctggtcactttgctccaattgcagattttgagttaattactaaagctaaacaagttgctgatgatatcggggcagttacacatgttggaaatattttatcatcagatacgttttataatgccgataaacatttcaatgatagttggaagaacatgggtatcttaggtattgaaatggaatcagctggcttatatttaaatgcgattcatgctggtaaaaaagctttaggtatttttactgtaagtgatcatatcttaagagatgaagctacatcagctgaagaacgtcaaacatcatttactcaaatgatggaaattgctttagaaatcgctgaataatcacttatcaatgttaatattaaaagttaaaagagccattgtagacgttttatcgtccacaatggctctttttaaaatagaatacttaaactaaataagatttaaacatccaattatgtttatctactgatgtttgcataccaataaacatatcttctgaaacgtcgtctcctgcttcacctgcaacttcaattgcttttccaagttgtttagaaatttgagttaaatcttcagagaaagctttaaccatttcttcagcagtgtaatgtgtatctgcttcttttacaattgaaagttctaaactttcttttaatgttgctactggattacctccaattgctagaatacgttctgctaaatcgtctacatattgactagcttcattgtataattcttcaaatttttcatgtaatgagaagaaattaggacctttaacataccaatggaagttgtgtaattttgtatatgctactgtccagtttgccacttgttgatttaattcttttactacatcttgttgcgtcatcgaatctctccttttttatacaatcatgtctctcttttacaatcataattatattataataattataatctgtaaagttattttacacacgtaatttgaaaacactaatactcatgaataaatatatagaatcattatcaaaagctttataatatataattaaaacttatatatattatcaattaaaaaatagttttctcatttattgtctatcatcatcaataaagaatgatttttcatatgcgttgggtttatgccaatgtgttttccacattttatctctattattagcaaatagtcgataacctaagtttcttattggtaatggcgttactctaagtagtatacctaaccatttttcactacttaatgttgtgattaattttgctactgcagtagtctcgtaatataaatgatctccttcttgtagtatcacactatttttatttttagcttcaggatgttgttcaaataaatgttgtcccgcttttccttttaaagtcgcaaactcatagtttttaggtaaaccatgttgtattagccaaatacaataattatagcaatacacacagtttccatcgtaataaacgattggcatgttccgtcaccttcctttttaacttatttaatttattccttttacaaggactcattaaacataaaaaagtggatatagaatttatttcaaattctatatccactttagctcattatacgttatgatgttttttatctaacttgtctgctattatgcatcatggttcacttttacaatacgtgtatattttaaaaattgttgtgaatatttattttttatatcttctaacttttcgtatgttaccccaataatatgccaattaggattaaaatgataaaaagaatctttttcacgagaccaagtaatcatgttaccgtctttattatatctaggtaatgtaacttcgtacccttctaaaacattaatataagtttgaaatatatctggatcaagtctattaaagttatcaattactaagtaacttttgtcatttttaggcataagttgtgtaataaaaccttctctataatataaggcacctgtctcattaggtagatatctgccatataacatatcttcactaaagtcagggtgaccactagtaataactggattagcattcgttttttgtaaaagattattggctgctttcaaaccttcttcacgtttatctacaacaagtaaaataaaaggtttaattgtctcatcatgatctgtattgaatcctggttttttaatagtctcaaatggtgttctaatcccatcattttcactcatttctataatagcatcgtattgtgcttgactcatacttgctattgcttgcttagcattttcttgtaaaaagtataagttttttaatttaggatgtttatttagtgcgcctaatgtaacaggagtgatattcttttcataataaatctctattgcagtactattagtacgaccaggaattggaggtttttcatgaatatgacgagatacttcaccaattcctacgaccgattgattactattcttatcataaaatattaaattatcccctacttctaattggttataaaaatgataaccattccgtttaattccattataagtatgtgtaaaaatcgtataatgtgtatcaggttcaaatttttcagtttcagataagaagaaatatcgaggtaattgaatgttaccttttcctaactcaacgattaattgaaactcctcttttgtgagctgatttattaacgtttctcgcatattattcattcgataatctagcacttcactacgttttaaatagtcagtagttaaaggctttaattcttcattaaatttaaattcaactctaattttattttgtgctcctgtttgaacactaataatttccccaattcctaataatccagtatctgtttgtacttgataaaaaatcacttgatcgccaattttagcttttttgaacgctcgaaaaccctgagtaggattgaactgtgctccagactcaaataaagttatttgtccaactaatggttcattatggttccatcttgtatatccacaatttaaccaaaagtaatttacttcttctgccatctagaatctccttcttacttattttaaatttagcatctttattcatgtatatattaatattaattttagcacctattagtcatttttagatagcttaacttaaatatatgaatagtctataagatttcgttttttttattttatcatatttttttaatagagttgacgtattatgaaatcactttttaaattcaaaaaagtgaaatagaatcatatgaatcatcacaaaattccatttcactattaaaatatactacctcattatttaaaccttattagatttccgattaacaaaaaaaggaaaataaaaaacttctagattcagctatcacactagaaaatcatgctagatatagaaattattccaacatttctgcttataaattaaattgattaactaaatataacttataattagagtgaactcgccttcaaatacgctatctaaatcttcagaagttaaaataaaattagaccccttttctagcttaaagatttctccatctgtaatcacttgtccatgaccttctaatacagaaataagacaaaattcacgaggcttcatataattaagcgttccacttatttcccatttaaccattgtaaaaaagtcattagatacaatttggctacgtttatgattttctacaattgtagtttcaggtactatagcaggtgcatttgcagtaaattgaatcacgtctaatgcttttttaacttctaatgatgatccatcagttcgattacgttcataatcatatactctatatgaaatatcagatgattgcattgtttcatatactaaaacaccagaacctatagaatgaagcattccagctggtataaaataaaactcacctggtttaactttgagtctttctactacatccaacaccgcctcttcttttatcttattctcaaatgtttcttttgaatcagcagaggtaccgagtataatttcagcatcttcttctgcatcaataatataccaacattctgacttaccatattgaccgttttcaaattcatatgcatacgagtcgtcaggatgaacgtgaatagatagagggtgtcttgcatccactattttacataataaagggaaatctttacttggaaagtctccaaataattctctatgctcattccatacttgatctaatgtttgaccagcatactgaccattttcaatcatattttttccattcggatgtgcagaaataccccagcattctccagtttgttcacttggtatgtcgtaattaaattgatttaacttattaccgccccatattttttcaaagaaaataggctttaaaaataatggcatgattgcacctcctaaaacacggttattgcttctctctttattttaaagtgaaatatcgtatttaaatgattatgtataattagaacaattgatgacccattttatctttaaattactatctatttaagcttttaatatatcagataactaattctatataaatgctatttcgcttctatagttaaataaaaattttcactcatatgtttattatatcaatttcattattaatttaatagaaattatatatattaataaaaaagaatagaacagcaagttttaaaactcactgtcctactctaacacagaacttttcatttgtaattaattatctaacttaactactcaaaacgagataatgcttcttgaatagattgatgccctgaaagaatttgaaattctttattttcaaatttattttcagaagtcgctacgtgttttaatacagaagccacatcttcgcgtggaattgtacttccttcatcaaaatacaagtcagctttaatttcaccagtacctgatttatcttctaaaccacctggatgaacgattgtataagttagtccagaatttcttaaatgattatctgcatagtgttttgcaattgtataaggttttaaatctccacttgcatcaaatgcttcacgacgtgaatcgtaagtagaaaccattacataatgtttaacatttgcttttttacttgcttcaatcgttttcactgcaccatctaaatcaacaatgattgttttatcagcacctgtgctaccacctgaaccaactgagaaaataactttatcaaagcctttgaatttctcagttaaatcatcaatactatctttttctacatctattaaaatggcattaacaccttgatcttttaacgcactttcttgttcttctttacgaacaccggctgtaaaatcaacttgatcttcttttaattggttaaccaatttagaacctacgccaccattagcaccaataactaatatactcataaacttatttcctccttcaattcatttcatagtttattaataccacttagtatcatttttaaacttatttactatatatcattgacacttagaaaaggacactatatattaatatatgaatatatattcatatattaaagaggaggtctcatgtgatgtccaatacaaataaagatagagatatatttatagatgaatacatgcttaaccgtttaactgagacatttaaagcgttaagcgattataaccgtttacgtattttagaattgttatataaaggtgaagctagtggtgggcatattacgcatacattaaaattaactcaatcaaatgtgtcgcatcaattaaagagtttaaaacaagcaggcctcgttaaatcgtcacgtcatggacaatccatgatttattctatagacgatcaacatgtttctactttattaaaacaagccattcaacatgctcatcatcaaagaggtgaataataaatgtctaatcacacacaccatcataaccatactcataatcatgtccataccaataacaaaaaggtattaacaatttcttttattattataggcttatttatgattgttgaaattttaggaggatttatcgctaatagtcttgcgctattatcagatggacttcatatgtttagcgatactgtttcactaggagttgctttaatcgcatttatttatgcagagaaaaatgctacttcaactaaaacattcggttacaagcgttttgaagtcttagctgccttatttaatggtataactttattaattattagtggcgtcattatcatcgaagcgattagaaggtttttcaatcctattaaagtgcaatccactgaaatgtttattattagtgtgattggacttatagtgaatattatcgttgcaataatcatgtttaaaagcggtgatacgtcacataacttaaatatgcgcggtgcttttattcacgttttaggagacttacttggttcattaggtgccattatagcatctattcttatatacgtatttaactttacaattgctgatcctatcgcaagcattctagtttccattattatattgaaaagtgcaatcggtatttcacgttcgtcacttaatattttaatggaaggtacaccaagtgacgtcaatttagataaaatcattagtacaattataaatcataatgaaatttataatgtccatgattatcacgtttggactatttcaaatgatatgaatgcgttaagttgtcatgcagtcgtctctgaaactatgtctgttcaggactgtgaaggacttcttaaaaaaatagaacatgaattacttcacttaaatatacaacatatgacaattcaattagaaacagcacaacatgatcacgatacttcagtactatgctctggattacataaagagcacgctcatcattaagactacacaaacaatgtccgcagtttacaatataagtaaaaagtcgaacagaattcatattagtttctgctcgactttttttacttatataaaataatcgaaaataaattgtttgcctggtacatgtttttcatcaaatccttgaagaaattcttcattatcatacggtaattttactctttcaacactaaactcattttcgttaattgtgacgattccatatacggcatatttaccattattaagtcctactgaaccaggattgaaataggttttgttattatcatcatacaagtgtaattgatgattatgtccaaaagctataaaatccgcatccttatcttcaaataatttaactatctcttctttttgattatctacaataggttcaaatggttgtttatcaatcccctcttctaatctttgattttcaatttcataatgtataaataaacattttttcccacaaattgttttttctaaatatcttggtagtgtatttaatacatcatagtaatcttcatccattcgactttcaatccattgatggtgttcataaaatttattttttaaatcttctggatacggtgtaccattaacaattgacataattgcttcatcgtgattaccagcaataatttccatatcatctcgatcgaaaatcatatctaatactttattggtttcatggccaattccaatattatcacctaagttaaagatttgatcgatatcttctctattatcaatatcatctaaaacagtttgtaaggcatcaaaattaccatgaacgtcggttaaaattgcaaatttcaccataaagtctcctttcattattaaatcattagcatattttaacacttaaaacataatattgttagatattaatttaaaaaaagcacaaattctgatattgtgtattatattaacgtaaaggagtgcttattttgtttaaatttcatagtttagcatttaaaaatgctaagtcacaactcataaaaacaatactatttagtttagtaagttttattattgtatttgtggcatttgtgattgctagaactttcttcgttcaaaactttatgcagatgcaactagcagcacaatttcaacagtcatcaggcgcgtcattagttatgataatactcgtcttggtcttaggattattattttttatacttgcaggttatcaattacttgcaggggcttttaatattatggctaaagctattgaaaaagaagctgttcaattttctgatttgttttttgcttttaaaaaaggaaaatatgttaaaagtcttcttttagctttaattactattattctttatgctgtattatatttaatcacattaggattaaactttttatttaataaagctttaacaccattattcacatctattcaacagtcagtaagtacatccgatcacgctattggtattttacttactgtacaaattatcttaattatcattatgggattcattctttcaatcgtatattggttcttctttatattaatgattaattatactgtgtcatttgcacgtaaaaatgacttaagtgctataggtcattttaaagatggctttaaaggaattaaaaatggatgtaaaacttggttcaagttctttttagctatcttattaattaacctactcattattatcattacacaaccacttggtacagtattaactgtattaaccggaaatatgtcccaaaatgtagcacaagtgattttaattattgctcaaacgcttattattattgtacgtttaattctatattttgtaattataatgggtattgttcaatatttcttacgtcgcggtgagaatgtgaaaagacctgtaaaagaaaagaaaaaaagtaaacgaaaagaaaaaaaagaaataaatcatgaaaaagaagcgttaaaaaacgatccttcatcttttaatgatacaaaaaatcatgttaaagaagacttaagtcatcaaaaaaatttaaataacgataaataaatcactattcaacacaaaaggtaagaaagcaggtatctcctactttcttaccttattttaatttaaaagatggtgttctaaatataaagccgcgccatcttcttcatttgtatattgtgtagtatcatcagtaatagactgaatttctggacgtgcatttttcattgaaacagtgtatcctccaaattcaaacattgctctgtcattatcgctatcaccaataacaagtgtttcttcttgtttaatatcgaaatgatctatcatttctttaattccagtgcctttatccacttgataagccatcgtctcagcattaaaccttgaagaattagatacgctaatatttaataacactttattttgtattaattcatctctaaacgttttaattttatttaactttttattgaaaagataaattttagaataggcgtcatttggaatatcttttctccaattaattttaccattcatggcatctcgacgtgatttccattcactttcactcacttcattttgtggatgttcactatcaatcatatcttccatccatgattgatcttcaattagtgaaattctatctccttcaaaaggaaaaacttcataataaatatgttgttgttgagccagttgcacgatttttttttacactatctattgtcaaactatgtttaaataaaagtttatcttcaatatcacctcttgttccattagaactaataacaccatctactttaaaaccttttggtactaaattatgaatttcagaataagaacgtcctgttgctagaaataccttataatttttttctcttaattgatcaattacttcttttgtttttacagtcgctttattatcttcatgcaatagtgttccatccatatctaagaatattgctttaatattttcaaatatcatcgtgataccctccatctaattctttcctaaaaattgtgacatttatttaaccaaagtgcaaactcaattatattttatataaagatgatatcgatttctatattgaatgacttcaatttgattattaaaaaatttagacataatcgaatcagttaaaatatcttttgttattcctttatcaaaacaactcccctcttttaataaaaatatcttactaaataaaggaataatttcctctatgacatgagtcacgtaaatcatcgtcaaatgagcgtatgtcttatttaaattttctaataaatataataactgctctctagccaaaaagtctaatcctgatgctggttcatcaagaataagcacatcaggttgatgtataagcgcgcgagcaatcattacatttgtttttgtcctgttgagagatatcctaaatattgatctttatatgataacattcctactaaatttaataatttttctgcttctttaatatgttcatcagaatactctttatatagaccaatagatttaaatatgccgcttaatacgacatcaatcactttctcaccgtcttgaaatttttctaataaactatgcgaaacaaatccaatatgttgacgaacgttttctgcagaatatccttttttacctggtaccatttcaaacatttctatttcaccctgagatacactttcataagcattcatgatatttaatagtgttgtttttcctgcaccattcaccccataaagaatccaattatctcccgtttcaatatgccaatttaaatcattaaggattgtttttccgtgtttctgtttatagatatgctttaaatttatcaaatgatcacctctacttaaaataagtgtatgatgattctgattatttaacaaattaaataaaaaactgagacatgtcatccatgtcccagctttttgaattattcaactgtaactgatttggctaagttacgaggtttatcaacatctaatcctctgtgtaacgctgcataatatgcgattaattgtagtgctactactgatactaaaggtgttaataattcgtgtacatgaggaatcacatatgtgtctccatctttttctaaaccttccattgaaataatacaaggtttagcgccacgagctactacttctttaacattaccacgaattgataaattcacattttcttgagtagctaaagcaatgactggcgtatcatcttcgattaaagcaatagtaccgtgttttaactctccgccagcaaatccttcagcttgaatatatgaaatttctttaagttttaatgctccttctaaacttacattgtaatccatcgcacgaccaataaagaaagcatttctagtcgtttctaagaattctttagtaattttttccattactggtgcgtcatctacaatcgtttcaattgcagttgttacttttgctaattctcttaataagtcaataccgttatcgcgtccatgcgctttagctacaacttgagaaagaattgataatacagcaatttgagctgtataagctttagttgatgcaacagcaatttcaggtcctgcgtgtaataacaacgtatgatcagcttcacgagataacgttgaacctgctacatttgtaattgttaaagacttatggcctaatttatttgtttcaaccaatactgcacggctatcagctgtttctcctgattgagagatataaataaataaaggtttttcagataataatggcatgttataaacaaattctgatgccacatgaacttcagttggcactctagatagtttttcaagatattctttaccaactaaaccagcatgataacttgtccctgcagcaatgatataaatacgatctgcattcgacacatctttaataatctcagaatcaatatttaaatctccattttcatcttcgtattcttgaataatacgacgcattactgctggttgttcattaatttcttttaacatatagtgatcataaatacctttttcagcatctgatgcatctatttgagcagtatacgttggacgatcttgaatatttccatctttatctttaattgttacactttcttttttaacaataacaatttcatgatcatgaatttctttatattgatttgtaactttaatcattgctaatgcatctgaagcaataacattaaagtcgtcaccaataccaacaagtaaaggtgatttatttttagctacataaatagtgtcttcatcctcagaatctaacatgcctaaagcatatgatccatctaataaagatactgctttagtgaatgcatcttcagtttctaaccctttatttgaaaaatattctactaattgaacgataacttctgtatcagtttctgatttaaacgttacatctgataagtattcgctttttagctcttcataattttcaatgacaccattatgtactaaagtaaaacgtccattatttgattgatgaggatgtgaattaacagtactaggtaccccatgagtagcccaacgagtatgaccaataccaatgtgaccatcaatgtcattgctatctgctaattttcttaattctgcaatacgtcctttttccttaaatacagtagtaccctcatcattgacaacagcaattcctgctgaatcatatcctctatattctaatttttctaaaccagataataataattctttggcattatcaaagccaatatatccaacaattccgcacatatttctttttcctccattacatagtcatatgataattttatctgctatataaaatttttcaattagacattgttcgtttttttgtattggattctaaacatcatatttctatgttttctatttggcgttcttattatatttgtacatctagtcacctatatgttttaaataataagctaacgaatgtgccacatccggaatagcatccgccgattatatcgataactattctcctcgtctacaatataattagtatgtctatgagtattctcctaattaatactaaatgattaacattctaattacttgtccaggcgctttgttttatttttattacatctatcctcctttcttccaatactatttattttacctttttttattaatcatttgcaaatattattatatttaattcataaacttatagtcataatttgatatttaatttatattttttgataaaaaatactctctttaaagttttcagttctacagctttaactttaaagagagtgtattcttgtttttaaatggtactattaatttaatcccattttttcttttactttattagcaattgtttgagcgtaacgttcagcatcttcatttgtagctgcctcaaccattactcttactaatggttcagttcctgaaggtctaactaatattcttccttcaccgttcatttcattctcaacttcatccataacagctttaacgtcttcattttcagacacatgatgtttatctgttacttttacattgattaatgattgtggatactttttcatttgggctgctaactcacttaaagttttaccacttgatttaataatagctgcaagttgtacgccagttagtagtccatcaccagtcgtgttatagtccatcattactatatgtccagattgttctccgcctaaattataatggcctcgtctcatttcttcaacgacatatctatctccaacttttgttttatttgattgaatgccttctgtttcaagagctttataaaatcctaaattactcattacagtagatacaatcatattattatttaattcatgatttttatgcatgtcttgaccaataataaacataatttggtcaccatcaatgatgttacccttttcatcaacagcaattaaacgatctccatctccatcaaaagctaaaccaaaatcactttcagtttctacaactttttcagctaaatgttcaggatgagtagacccacattcatcattaatattgtatccatctggattacaaccaattgtaactgttgttgcctctaaatcaccaaataagaaaggcgcaagtgaagaagttgatccattcgccccatctaatgtaattttaagtccatctaaatttatatcaatagtagatttaagataacttaagtatttttgtgcaccttcataataatctgaaaaatgcagaatgtctttacctgcaggacgtggtaagtcaggttgttcttggtctaataattgttcaatttcttcttcttgcttatctgaaagtttaaaaccatcagcaccaaagaacttaataccattgtcagccacaggattatgagaggcagaaatcattatccctaattgtgctcccatttcacgtgttaaatatgcaacacctggagtagaaataactcctaatctcattacttctgcacctattgatgctaatccagcaattaaagcagattctaacatttcacccgacacacgagtatctctaccaactaaaactctaggatgtttctctccttcattatgtgctaatacataaccaccatagcgacctagcttaaacgctaattcaggtgttaattctttattagctactccccttacaccatcagttccaaaatattttcccattttaattactcctttattatctagtttactattttaaattgacatgtgctgtgacttcattgaattcagatttcttaacctgtttaggtattttgagttcaagagttttattagttgactcagtgatatcatctaaatttacatcagcttctatgtcattaatatccttcaaatcatctttattaccataaatttctacttcattctcatttagtttaatgttatctaaactttcatcgtcaggtaacgaaccctttttaacagttttaatttttacttttttactgtaaggttcaagtttcactgacattttaacattattaggcttgatctgaacgtttaatttattcaattgcttgtcaaatgcagtaatttcagctacatcagtagtatcctcactgatattagtcgcatttttaaatgtcgcttttaaatatgcaattttatctaattgctttttaccgcccgtaacttgaacagtatttttatttaaaaaagcttcacttactttataatttgaatttatattgttttgtgcaatatcaggctgaacatgcatagttttagtgtctttatcttccaaagtgatatacgcatgtttaggtttaacattataactaatatcgttacttaatcccttaacaatataatcttctttataatttccagatttagcattagataaattaactgtaaccttgatatcgtctgaactttctattttcaataactttgattgtggtcctgaaatagtaacatcaacagtatctggtgatttagtaacatgtaaattttttgtattataaagaatttctacaggtacatcttctattgttttagaagaattctgagatagattatcattgttaaaaatattgccaaacacattattaacagaaagataaaaaaagatcgctaatattaaggcaaaaaatcttaatccccatttactttctaacatgctatttcacacccttcttttgagcgcgagctccaaaccaatgttcagctaataactcttcgaatacttcatcagaaacatcacgtcttaatttaccatcgaaagtaactgatattgaaccggtttcttcagatactaccacagtaaatgagtccgaaacttcagaaattcctacggctgccctatgtcttgtacctaaacttttagaaattttattactatctgaaagtggtaaataacatgcagcactagcaattttagtattttgaataatcatagccccatcatgtaatggtgtattaggtataaaaacatttatcaataattcttgagatattgcagaattcattgatataccagtttcaatatagtcttgtaatccagtttccttttcaaaaacaattaatgctccaattcgtcttttagccatatactgaacagcctttgatacagattggattaatttttcttcatcatgactgtaagtattggtatagcgtttaaataggcttcctcgccctaattgctcaagtgctcgtcttatttctggttggaatatcacaattaaagctaaaacgccccattgaatcacaatatcaaataactttgaggtagccgttaaattaagaagtttacttacttgttgtccaataactataaataatatacctttaagcaattgaattgctttagttcctttaaatacagtaatgagaagataaaggacataccagacaataagtatatctaatatacttgtaataatcttcaaagtactaagattattaaaaaagttggaaaaatccataatctctcctccgtctataactttcatactcataattataccaatgaaaggtgtaactgtcatactatgaaagtcatacttataaattttttcataaacatcactactaaaaatgggtaataaaaaagcaccccattaaggagtgcttaaagtgagccatagaggattcgaacctctgaccctctgattaaaagtcagatgctctaccaactgagctaatggctcttatggctgggctagctggattcgaaccagcgcgtgacggagtcaaagtccgttgccttaccgcttggctatagcccaataagatggtggaggggggcagattcgaactgccgaacccgaaggagcggatttacagtccgccgcgtttagccacttcgctacccctccgatatttaaatggtggagaatgacgggttcgaaccgccgaccctctgcttgtaaggcagatgctctcccagctgagctaattctccaaataaatgactcctacgggactcgaacccgtgttaccgccgtgaaagggcggtgtcttaaccgcttgaccaaggagccatggctccgcaggtaggattcgaacctacgaccgatcggttaacagccgatagctctaccactgagctactgcggaataatatttatgcctggcaacgtcctactctagcggaacgtcagtccaactaccatcggcgctaaggagcttaacttctgtgttcggcatgggaacaggtgtgacctccttgccattgtcaccagacaagtgaatgattatacattcaaaactagatagtaagtaaagatttgcgtcgcaaaacttgaaaaattgattaagtcttcaatcgattagtattcgtcagctccacgtgtcaccacgcttccacctcgaggtggaagcgtggtgacacgtggagctgacgaatactaatcgatcgaagacttaatcaattttttcaagttttgcgacgcaaatctttacttactatctagttttgaatgtataatcattcacttatctggtgacaatggcaaggagggtacacctgttcccatgccgaacacagaagttaagctccttagcgccgatggtagttggactgacgttccgctagagtaggacgttgccaggcatacatattggagaattagctcagctgggagagcatctgccttacaagcagagggtcggcggttcgatcccgtcattctccaccattcaatttaatagccggcctagctcaattggtagagcaactgacttgtaatcagtaggttgggggttcaagtcctctggccggcaccatctaagagccattagctcagttggtagagcatctgacttttaatcagagggtcagaggttcgaatcctctatggctcacatgtatacgcgggtgtggcggaattggcagacgcactagacttaggatctagcgccttacggcgtgggggttcgactcccttcacccgcatatgcggaagtagttcagtggtagaacatcaccttgccaaggtgggggtcgcgggttcgaatcccgtcttccgctccattattttgccggggtggcggaactggcagacgcacaggacttaaaatcctgcggtgagagatcaccgtaccggttcgattccggtcctcggcattattattattttgcgcccgtagctcaattggatagagcgtttgactacggatcaaaaggttatgggttcgactcctatcgggcgcgttctcttacgggaagtagctcagcttggtagagcacttggtttgggaccaaggggtcgcaggttcgaatcctgtcttcccgataggaaattttaaaatttattatgggggcttagctcagctgggagagcgcctgctttgcacgcaggaggtcagcggttcgatcccgctagtctccaccatttaaatcatttacaaactatataacggcggtgtagctcagctggctagagcgtacggttcatacccgtgaggtcgggggttcgatcccctccaccgccactaattattagttgtagaattaaaatttggacctttagctcagttggttagagctaacggctcataaccgttcggtcgcaggttcgagtcctgcaaggtccatataattttggaggaatacccaagtccggctgaagggatcggtcttgaaaaccgacaggagcttaacggctcgcgggggttcgaatccctcttcctccgtatttggtctcgtagtgtagcggttaacacgcctgcctgtcacgcaggagatcgcgggttcgattcccgtcgagaccgccatctaataatttaatagcaatttacctataaaatgtggaggaatacccaagtccggctgaagggatcggtcttgaaaaccgacagggccttaacgggccgcgggggttcgaatccctcttcctccgccatttttattatcgcgggatggagcagttcggtagctcgtcgggctcataacccgaaggtcggtggttcaaatccgcctcccgcaatttgttttggtctcgtagtgtagcggttaacacgcctgcctgtcacgcaggagatcgcgggttcgattcccgtcgagaccgccatttaatcattttaatatatatggttcagtagctcagttggtagagcaatggattgaagctccatgtgtcggcagttcgattctgtcctgaaccatttcttgccggcctagctcaattggtagagcaactgacttgtaatcagtaggttgggggttcaagtcctctggccggcaccatcttaatggaggggtagcgaagtggctaaacgcggcggactgtaaatccgctccttcgggttcggcagttcgaatctgcccccctccaccattataaatagggacatagttcaacggtagaatagaggtctccaaaacctttgatgtgggttcgattcctactgtccctgccatggcggttgtggcgaagtggttaacgcatcggattgtggttccgacactcgtgggttcgattcccatcaaccgccctttattattaatgggctatagccaagcggtaaggcaacggactttgactccgtcacgcgctggttcgaatccagctagcccagttttttattggcggcatagccaagtggtaaggcagaggtctgcaaaacctttatcaccggttcaaatccggttgccgcctccatgtgctatgcgggagtagttcaattttagaacacattccttcccggaatgagatataggtgtaagtcctatcttccgctccataatttaatataatgcgggagtagttcaatttttagaatatgttccttcccggaacaagatataggtgtaagtcctatcttccgctccataatttgatacaatgcgggagtagttcaatttttagaatatgttccttcccggaacaagatataggtgcaagtcctatcttccgctccataattgcttccatagggaagttttttatttatctatattaagccggcgtggcggaattggcagacgcgcgggactcaaaatcccgttcctttattggagtgtcggttcgaccccgaccgccggtatttaatggagttaaaaggattaagtagaacactctacttaatccttttttatttgatcattttttaactacttattttatattgtataaaacggtataatataatattatatagctaatatttaaaaatggaggctattatgagtagaactagaataaacttaaaatatttttttagtaatattcttaatgcagttggtgcaggagtagttattgcattacttcccaatgcacttttaggagaactactaaaattatttaaagatcaccatccaatattagagcttgtttttcaattagtgacaattattcaatcgtttatggcatttattattggaatactggcagcacatcaattcaaatttagtggtgcgggtgctagtatgataggtgtatcagcaatgttaggctctggagctatacaaatgaatgcaaatggtattgcattaaaaggaattggcgatattataaacgtgattttagttattattatcgcatgtgctttatttttattattacaaggaaaatttggttctttagaaatgattattttacctgtatttattccagtagtcagcggattagttggattaacgactttgccatatatacaaattattacaaaaagtttaggacatatgattaattcatttactgaatttaatcctctaattatgtctatcttgataagtgtgacgttttcactattaatggttacgccaatttctctagttgctattgctacagctattagtttaaatgggttaggtagtggtgcagcaaacatgggaattgttgctgcatgcgttacttttttctttggttctttacgtgttaattcagttggtgtcaatttagttttatttattggcgctgcgaagatgatgattcctgtttatttaaaacatttaatcattgcaataccattaaccattaatggtattatttcaggtttgttaacatacttcattggtataaaaggaacaccattatcagctggatttggttatacaggattagttggaccaattaatgcgtttaatagaatgccgggtgattcgacatttaatattattctattagcattaggttattttattgttccattcattagtgcttttattattcatgaattatgcaaaaagtttataccatcttataatgataatatttatagatttgaaatcacacatcaataatattattttaatggtatttaagcatctatattactatagatgctttttttgtttaaaatttttattgcatattaattctttattatgtataataattaaaaagttataggaggttgctatatgaaatatatgtttaaaacaattatcatagcaatcttaattagtttgacctttataaataaagaacctatggctcatgctgatcaagatgcaaaatgggaaaaaattaaggaaagtggagaattaagggtaggattatcagctgattatgcaccatttgaatttgaaaagactgtaaaaggtaagagtgaatacgtaggtatagatattgatttagctaaaaaaattgctaaagataatcacttaaaattaaaaattgtgaatatgcaatttgatagtttactcggtgcattaaaaacgggaaaaattgatgttattatttctggtatgacttcaacaccagaaagaaagaaagaagttgatttctcggattcttatactaaaacgggcaatgtaatgcttattagaaaaagcgataaaaataaatttcatacattaaaagacttttctaataaaaaagttgcggcacaaaaagggactgaacaagaaaaaattgctcaacaagaaatagagaatgcagacattagttcattaaatcgtctaccagatgctattcttgcagttaaaagtaataaggtagaagggttagtaatagaaaaacccgttgctgaagcatatgtaaaacaaaataacagcttaatgatagccaatgtgaattttaatgaagaaaagaaagataatgtcatagctgtgccaaaaaattcacctattcttttagcaaatgtcaataaatctattaaggaagtcaatgaccaacatttaattagcaaatacatggacaaagcttctaaagatatgcaagacgatagtagcttttttgataagtatggtgcatttttcatcaaaggacttaaaaatacaattttaatatcaatgattggtgtagtattaggagcagtattaggagctttaattgctttagctaaattgagtaagtttaaattgctgtcatggattgcctctatttacatagaatttttaagaggaacaccgatgttagttcaagtatttttagttttctttggaacgacagctgttctaggtttagatgtttcagcattagtatgtggtactatcgcactagttattaattcttctgcttatattgcagaaatatttagagctggaattaatgctgttgataaagggcaaacagaggcagctcaatgtttaggattaaattattctaaaacaatgagatatatcattttaccccaagcaattaaaaatattttaccagcactaggtaatgaatttgtaacactaattaaagaatcatctattgtttctactattggagtaggagaaattatgtttaacgctcaggttgtacaaggtatttcatttgatccttttacaccgttaattatcgctgcgataatgtactttattttaacatttacattgtctagaggtatgagtttaatcgaagggagaatgaaagccagtgattaaagttcaaaatttaaataagtcatttaataaaaatgtagtactcaaagatattaatttagaggttaataaaggggaagttgtagcaataatagggccatcaggaagtggtaaaagtacattattaagatgtatgaatttattagaaataccatcaaatgggaaagtgatttttgaaggaaaagaattaacacataaaaatataaatttaaatgaattacgtcaaaaaatgggaatggtatttcaaaatttcaatttatttcctcacaaaacagtaatagaaaatgtcattttagcacctaagttgttaaaaaaagttgatttaaaaaagctagaaattgaaggtaaagcacttctaaaaaaagtagggcttgaagagaaagctaatgcatatccttctcaactctctggtggacaaaaacaaagggtagcaatagcaagagctttagctatgcatccagatgtcatattatttgatgagccaacatcagcacttgatcctgaagttgtttatgaagtacttaaagttatgaaagatttagctaaagagggtatgacaatggtggttgtaactcatgaaatgggttttgctaaagatgttggtgataaagtaatatttatggcagatggatatgtcgttgaaagtgaaacacctgatcaattatttaatcatcccaaacatgaaagaactaaaaactttttggcgaaagtattatagcatgttgtatgtgaagactaataaaatatttataaggttttatatctaaaaagtaataaatgttaattaagaaaagaagatagaatgtattctgaattataaacatagactttctttatgaaattctcaaagttaaagaatctgagacacttcaaagtatatctcagattcttttttatttataaaaatatttaatatcataaaaaattaagattatgttaaaatattctatggacttttttataggaggcaagagtgttgatgaaccatcaacttaaacaggaaatcattgactatgcgtattccattggtatagatagtattggttttactaccgctgatcctttcgatgaactgaaacaaaagttagtagattatcatgaaaaaggttatgcatcaggttttgaagaatcagatattgcgctgcgaacagaacctaaattatctttacccacagcacgttctatcatagctattgctgttggttatccaaataagctaaagggagcgccaaaaagtgtaaaaggcgatagaagaggaatgtttgcgagagcctcttggggtcaagattatcattcaattatgaaaaaaagattagataaattaagtgaatttattcaatccaaggtccctgatgtcgaaataaaaagcatggttgacactggggtactttcagatcgcgctgtagctgaaagagcaggattaggattcgttggtagaaatggatttgttattaatccaaaactaggaacttggacatatttaggagaaatgttagttagtattccttttgaaccagatgatcctatattagacagttgtggagattgtacaatttgtgtagatagatgtccaacgggtgctttagtagggaatggtcaactgaattctcaaaaatgtatcagctttttaactcaaactaaaggatatttaaaagatgagtatcgatataaaatcggtaatcgtctttatggttgtgatacttgtcaacaagtttgtccgaaaaatagaggtattaatacaacccacgaagatattattttagaacctgaaatattaaagccacgtttagttccattgttacaaatgagtaataaagaatttaaaaatacttatggtcatttggcaggagcatggagaggtaaaaaacctatacagcggaatgcaattattgcacttgcacattttggtgaagaagcggctattcctgaattaaaggaagtagcattgaatgatccaagacccatgataagaggaacagcatattgggctattggtcaaatacttggcaatgatgcaagaacatttatttatgagcactatgataatgagattgaagaagttcaagttgaaatgagaaaaggactagaaatgaggaaataaaatgacaaatcatattgtgttattccaaccagaaatacctgcaaacactggaaatatcgcacgtacatgcgcaggtactaatacacacttgcatttaattaaaccattaggctttagtacagatgacaagatgctaaaacgagctggattagattattgggaacatgttaatatcacttatcatgaaaatattgaatcatttttcgaagtgacaaatggtaaatattatttacttactaaatttggtaaacaaacttatagtgattttgatttttcaaatactgaaatagaaaattattttatttttggtagagaaacgacaggtttaccagattgggtgaaagagaagtatgcagatactgctttaagaattcctatgagtgatcatattcgctctttaaatttatctaatactgctgctttattgatttatgaagcattgcgacaacaaaatttcccaggattaaagtagaatttaaaattaattactataatagaataaaaaatgttatatttattaatgaattattataaaaattttaaaatagtttgatatccccttaaatagggtaatttagtaaataaatgaattattttagttgaactttacatttagaggagtgtaattattatggcaatgaattttaaagtatttgaagataaacaacatgcagcagattacgctggagatattattagaaaacaatttaacaataacccaactaccattgctggatttcatttaaacaaggattctgcacctgtattagatgaactaaaaaaatcagttgatcgtaacgctgtagattttagtcaaattaatattcttgattatgatgataatcattcgttctatgaagctttaggtgtaccttctgagcaagtatattctattagtcttgatgatgatgccgaatcattaatcaatgatagaattaaaacaaaggaaaataaagggaaactgactttacaagttgtttcaatcgataacactggacatttagatgttaatattcgtcaaggtttgatgaaagcacgtgaaattatcttagttgtaactggtgctaaaaaaagtgaagttatcaaacgattatatgaagaaaatggtaaatcaaactttttaccagctgatttaaaagtacatcgtatggtaacagttgttttagacagagctgctgctgatggattaccagaagatgttaaagaatacttcacagcgagatttgcataatatttaattttattgtgaggttatttttatgagtaaagatagtaaacgtaattatcatgaagacgaaaatgcaatggttcaaaatatgaatgatttagaagcattaggaaaagaaatggaacagatttctgaagaaaatgatgaagataaatataatcaaacacatgattcagaagcgcgttcagatttaaattaatatattttagcattttaattaattgcttcggtagattaattaaaatgctttttttatgtaatacaacttatgatacaatatattttaatgaaaatgaaggagataaaaatatgttacataagtattggctacctttaacaattattacaatcattgttagcttaatttctattaaaggttttcccattgctctaggagcactctatctaccagtgttatttaaagtgattcaattacaattgaatttatcaaaagatttaatcgataatgcaactgctcatccattcattaagagtaatcaaaaaggaattatgattagtgtgatatgtatattaattgtaaccggaatcttggcatatacacttaatgatttttatcgaagtttaggtgggggtttaggtatattagtaaagataagtcctgttacgctggtcataagcgctattttgtatataataagtgctatttcagttgtaaaagcagtaaaatataaatatgaataagatttaattcttaaacacgtgaagtaatacaacttcatgtgttttattttataaatgaaaccgctttatattcgaattgctacattaattttattaatgatatactattactaaatcataaataagggggattattgaatgtctgtaagaattgaacatgatacgtttggtgaaattgaagtaccatctgataaatattggggcgcacaaactgaaagaagtaagcgtaactttccactaggtaaagaacatatgcctattgaagtgatttatggttttgctcagttaaaaagaggtgctgcgcttgctaatcatgaattaggaaaattaagtgatactaagaaagatgctatcatttatgcttgtgacttaattttaaaaggagaacttgatggtcattttcctttagttgtatggcaaactggaagcggtactcaaagtaatatgaatgtaaacgaagtcgtaagttatgtggctaatgagtacttaaaagaacataatagcgaggaatcaattcatcccaatgatgatgttaataaatctcaaagttcgaatgatactttcccaacagcgatgcatgttgctttataccatgaaattgaaacgaaattagaacctgctttaaaaaatttacgagacacgtttaaagaaaaagaaaaccaatatcaatcaattattaaaattggtagaactcacttacaagatgctactccaattcgattaggacaagaaattagtggatggcgttatatgctagataaatgtgaacaattattggctgaatctaaacaacatattttaaatttagctattggtggaacagcagttggaacaggaattaatgcacatccagaatttggagataaagtagctaaatatatctcagaacatactggttatgcatttgtttcatctgaaaataaatttcatgctttaacttcacatgatgaagtggtgcaacttcatggaacactaaaagcattggcagcagacttaatgaaaatagcaaatgatataagatggcttgcttcaggacctagagccggacttgcagaaatttcgattccagaaaatgaaccaggttcatcaattatgccaggcaaagttaatccaacacaatgtgaaatgctaacaatggttgcagtacaagtgataggaaatgatacgacagtaggtatagcgagttctcaaggtaattttgaacttaatgtatttaaacctgtgattcttcataatacattgcaatctatttacttattagctgatggaatggaaacatttaatgaaaattgtgctataggtattgaaccaattgaagaaaatatcaatcattatttaaatcaatcattaatgcttgtaactgcactaaatcctcatattggatatgaaaaagcggctcaaatagctaaaaaagctcataaggaaggtttaacacttaaagaatcagcaattaattctggctatgttacagaagaacaattcgagaaatggattaaaccagaagatatggtcgatcctcattaaaataacattaccaattgaaatgctccttttaaagataatgctttgatctgcgttatctaaaaggagcatttttaaaatttattcatcatctaaacttacagaaatcaattcttgagtaagtggatgagtgaattctatcttataactattcaattctaattgacgtaaggtagcatctccatataatggatcacctatgacaggatgaccaatttctgctaaatgtacacgtatttgatgagtacgtcctgtatctaattttatttccaattgacaaatgccttctttaatcatttttgatgttaagatatgagtgatagctcgttgcccggtattagaaatacgacgcttattgggatgaaatttatctttaccgattggcatatcaattgtttgtggttttagaggtagtaatgcttttacatttgcacgataaatacgtgtaatttgattctcttcaagcattctatctagtatttttttcattaaaggatttttagcaacaattaataatcccacagtttcttggtctagacgatgaatcggttcaacgtagtcgctatccatggtatagataacatggttcattagtgtattgctttcttttaaatcatttggatgagttttaactcctttaggttttaccacgatcgctaaatcgttatcttcatatgcaatctgtgcgtaacgataacttggtaaataattacttttttctttaggggtaggaatataaacaacatcatttgtgacaactttatctgtcaatttactagattgttgattaatcgtgatatctttagacatatttaattggtgtaaatctttttttggtagttttaacttttgaaaaatttcacgtaacgtataattattgaaagtttcaggtacattgaatttcataatatcctcctattatattctgtttaatcatatcataatttacaatgataattataaatgttttcattagtctatttttaaatttaaaaaatgaacgatataataataaatgcaaaataacaaaatggggcgaaaatatggagaaaccgacacgtttagcattattaaaagaaattgctgaatatctaaatgaagaaactgaattatataatatgatgaataaagcattggattatttaatcaatggcagcaattttacaacaggttggattttttttatcaataaaaaaggtgaacaagaacttgtagctagcactgacttacctcattcattaaaaaataataattgtaagtatttaaacaatggtacgtgttggtgtgtcaatgcttatcatcataaaaatttaacaaaagcatctaatattataaattgttcaagaatcaatttagctaaccaagaaagtcaaaaagatgattatcttattacgcatcatgcgacagtaccacttagatcaggagatgaacagtatggattattaaatgtcgcgacacctcatactgtagtatatagtcaagatgatttagagttattagaatcagtagctttacaaattggttctgcaattaaacgtatatacttaacagaccaagaaaaagaagcagcacgcacaagtgaacgaaatcgactagcacgtgatttacatgattcagttaaccaaatgcttttttcattaaaactaacagctcatgctgcacatgatatcacagaggatagaacagctaaaaaagcatttaagttgattgaagatacaagtcaaaacgcagtaaatgaaatgcgtgcgttaatttggcaacttaagccaattggtttagaacatggattagtgaatgcgattgaacattatgcgaatatgttagatttaaaattaaacatcgaagtaagaggattgattaaattatccaatttagttgaagaaaatgtgtatcgaatgattcaagaagctctaaataatacgaagaaacatgcacaaacgaatcatgtatctattaacattcaacaaaatgaaaatcaattatatattaaaatttatgatgatggaaaaggatttaatgtgcgtgatgacttaaatcaaacgacgcatggtctaaaaaatataaaacaacgtattcatagtttagatggagaatttaacatacaatcagataaactaatggggacaactatttatcttaatattccaatttaaagtaggtgataaatttggcaagtatcgttttaatcgatgatcatcacatcgttagacaaggactagaatttctaatttcaacagttgagggtttagatatacaagcaagtttttcagatggtgaagcatttattaaatatttaaatgagaataatattcctgatttagtattattagatttagttatgcctaatatgaatggtatcgaagtgacgcattatataaaaacatattacccttacataaaagtgttagtgcttacaagttatgtggatgatgaatatgttatgtctgccattaatgaaggtgctgatggttatgaaattaaagatgttgaaccacaaaagctgattgctactattactaaagtattaaataatgagaaaataatacatccaaaagctaaaaatgtaattgatgcaatgcatgaaaaaccacactttaataataaattatctaaaagagagatggaagtattaaaagaaatggtgaaaggtaagacaaataaagacattgcaaaaagtttatttgtatctgagaaaacagttaagacacatgtcagtcatatatttaataaattgcaagtttcagatcggacacaagctgctatatatgctattgaaaataaattaatataaattgaataggtctattagaaataaaacggtatttttaaaataggataataataaataaatgacttatattattattttaattattttgataattttgccatttataaaattatacgtaaaaacaaaaatttctcttttcattttattgaaaatatattaagatgtaatttgtgtttcaagaaatgtgtattattgcaatttcttgcgtccggataaaataactcctattagaaaggtagagaagagtaatggatagacagagttttacagatttaattcaaacaaaatttaaaatggtgcgtattgaagcaggatacacacaagatactatggcacaaacaataggtctttctaaaaaaacacttgttcaaatcgaaaaagaacgggtattaccaaactggacaacttgtgtatcaatttgtgctttatttagagattcagatgttttaaataacacatttggttgtgatccattagaaattgtacaaacaatttcaagaaaccattgtgcatatcctaatcattctacaacaagtgatatttattggaatacaatggaaactcgcaatggatttattttacaaagtaataaagtaagtaatatctatagagtgcttaatcctgaaaaacaacctatttttggaacatctaaattaagagaagcagaaacttactttaatagaaatgctaaagaagaattaatgcacgtttaattttaatataaataagatatagtgatagaagagttgactttcaactgaatcactattttcaattaataatgaattcactgtaattttgcgatgaattcattatttttttatttcaaaaatttgtaaatataaatgtacgttgaacaattaagttatgaagtttacatttgtcatggtataattttgctattgcttatataaaaattaaggagttatttaaatgcaagcagtattagtagtcatctttatgatagtaataggagcaatcattggcggtgtcacgaatgttatagctattagaatgttgtttcacccctataaagcgcattatatatttaatatgcgaatcccatttacacctggtttaatacctaaaagaagagatgaaatagctacaaagataggacaagtgattgaagaacatctcattacagaaacattgattcacaacaaactaaatgaaacaaaaactaaagaaacgattaataaattagttaaggagcaaataacgaaattaaaaagtgatcaagctacaattcgttactttgctgagaaatttgatattaaaattgattacttagtcaatgagaaattagaagatacaatttcacacaagctattagctttttataatgatcatcgaaatgaagaagtgattaagttactaccaaaagaaactaagcgaatgattgataagaaagtcgagccattaggagatttattatgcgaaagagcacgtgtttatttgtcctctgataaaggcgctcgtgatatttatgacatgcttgatacattttttaatgaaaaaggtaaaatcgttggattactacaaatgtttatgacaaaagaaagtattgcagatagaatccaacatgaattgattcgtttaaccaatcatcctaaagcaaaacgtattgtaaaccaagtgattgataatgaatatgagacgctgaaacgacaaccacttaagaaaatcattgatgaggctcaattttcaaaactatcagactcagttaccttacttattacttcatatttaaatttaaatgaaaaaatagataaaccacttaatcaactatcaccaagattaatgcaatatttagagacaacgttatcagataaagttacacaacttattattagtcaagcatccaaacatctctcaactataatgcaaaaaattaatctacgtaaattagtagaagatcaaatcaatacatttgatttagattacattgaaaagttgattattgaaattgctaataaagaattaaaattaattaccttattaggatttatattaggtggtattattggccttttccaaggtttaatcgcaatttttgtataactaatcataatatgttatggtattaaagagttgtcaaaacatcattattacacgaaggagtgcaatttaaaatggcagtaaatttatatgatcatgcaaatcaactagaacaagcattaagagatagtgatgaatacaaagctattaaagatgcttttgctaaagttaaagaaaatgaagaatctaaaaaattattcgatgagttccgtgaaactcaaatgaatttccaacaaaaacaaatgcaaggtcaagaaattcctgaagaagaattagctaaagctcaagaacaagctcaagctattgaaaaagatgaaaatatttcacaattaatgcaagcagaacaaaaaatgagtcaagttttccaagaaattaatcaaattattgtaaaacctttagacgaaatttacgttgactaattaataatttaagtgatggatactacgcgattttttcataaaattgcgtagtttttttatgtcaaagttcatcgacccatattcataagatatggtaaaatatagtaatacataaagataccttatcaaacatttaaggagcttaaattaatggttaaatttattcactgtgcagatttgcatcttgatagcccttttaaatctaaacaacaattatcgacaagtattttcgaagatgtacaaaaaagtgcctatgagagctttaaaaaaattgtagatgtagcattaaaagaagatgttgattttatgttaattgtaggagatttatttgatagtgaaaatcgcacattacgtgctgaaatttttttaaaagagcaatttaaacgtctggaaaaagaacaaatatttgtatacatatgtcatgggaatcatgatcctttaacaactagaattacagataattggcctaataatgtatcagtattttcaaaccgtgttgaaacctatcaagcgattactaaagctggagaacaaatttatattcatggttttagttatcaaaacaatacaagttatgaaaataaaattgatgaatatccatctagtcaaagaagtaatggtatacatataggaatgcttcatgggacttatagtaaatctaaaataaaacagcgttatactgaatttatgttagaagatcttaatcataaactgtatcattattgggcactcggtcatattcatcaacgtcaagaactaagtgatatgccgcctattcattattcaggtaacattcaaggtcgccactttggtgaaataggaactaaaggttgtttgcttgtagaaggggatcatctacatcttgaaacaacttttataccaactcagtttatacgttttgaagaagctacaattaagactgataaaatttcaaaacaaggtatctatgaggaaattcaaaagtttaagaaacaagttcgtgaacaaggtaaagcattttatagattgacgattaatatagataatgacaaaattttatcaacacaagatattcttcaaataagagaaatgattagtgaatatgaagaaaatgaacatgattttattgtcattgaagatattattcttaattatatacagaatgaagaaacacctcttataaatgaattttctaaagaactcataaacgatgacaaagtgtttgaagaggcaatgacagatttatatttaaatccaagagcttcaaaatatttagaagactacaccactttcaataaggcaaaactcattcatcgagctgagaaaatattaaaagcagatatgagaggtgaagaaattgattattaaatcacttgaaatatacggttatggtcaattcgtacaacgtaagattgaattaaatcagaattttactgaaatttatggggaaaacgaagcaggtaaatcaaccatacaatcatttattcattcaattttatttggttttcccacaaagaaagaaaaagaaccgcgtttagaacctagattgggaaatcagtatgggggcaagctaacgcttattttagacgacaaatctgaaattaaagttgagcgtgtaaaaggtagtgctcaaggtgatgtaaaagtttatttagaaaatggattgataagagatgaagcatggcttaagaagaaattaaactatatttcaaaaaagacatatcaaggaatattttcatttaatgtacttggtttacaagatattcatcgaaatttagatgaacaacaattacaaagctatttattagaagctggtgctttaggatcttccgaatttacatctatggggcaaattgttaatcagaaaaagactacgctttataaaaaagctggaaagaacccaattctaaaccaacaaattgaagaactaaaacaattagaagcacaaataagagatgaagaaaccaaattagacgaatatcaacgtcttatagatgaaaaagataaatcagaacgccatctttctcatttaaaagaaaatcttaagcaattatcaaaaatgcatgaaaataagcaaaagcagttaggacttcatgctcatgcgcaagaatggaaatcacttgagcatcatttaaatatcgaaccgttgaagttcccagaacaaggtattgaacgatatgaaactgcattaaaatataaacaatcacttgatcgagatataggattaagggatgagaagataagacaactagaaaatgaatttaatttaattcagatgcctgaggatagaactgtaagtgatatgtatcatctttatcaacaagagagtgatatcaaacaatctgaattaaaagctaaggctttaaaaaaggaaatagaaacttttgaacgttctcagcaaacattaaaagatgatatcggttggaatgaagtttatcatgaagcggatacttctgaaacgatgaaggattatataagtgaaaaaattaaaaattataatcatcaattaaatcaaaagcaacaagttgaacgtatgattggtgagcataatattgaaaaaaaggaaattgaaaaggaaattaagtcattggaaagtgaactcgtttctgaaacagcacttgaaaagaaaaaagaatataatcagcaaaaaatagaattacatgaaaaagaaagtttatactcaaaattaaaagcctcctttgaatcagaaaaagaaagaaaacaaaagcaatatcaatggttaaaaatcagctttatcattttggctttgataagtgctggtttgactatttttgcatttattacaactagtgtcacttttagtatcatttttgcaattctcactgtgatatttttagtaggtttattctttagtaaaaataaagatattgattatagtgaaacaattagtgaggaaattagtgatttagaacaacaacttaaagcactcgaagataaatacgatttagatttcaatctagatgatcagtaccaattgcgtgaacgttggaataatgctaataatactaaaacagtactttctaataaacttaaccatcaacattcgattttatcagatattcaatcttcaattgatgcattagcacaggatatttctgaagtcaaacaagacattaaagtatcagatagaatgtcagatgaacgtttagtagatagtttgaaaacaatgaatcaacttaaagttaatgataaacaacttaataaattattattagagaacatagagttaaaccaaaatttaattaacttctatgatcatgctcaggatgttactaaagatagtttcgacgagtttaataaaatttcattatttaatgatttgaaacattggatttctcagtatgaaagtaaaaaagaaaagaaaacgcaattacgaaatcaattaactttattaagtaaagaattaaaacagttagaaagtcgtttggatgaaaataaaacaactataaacgagttgtttaaatatattgaagttcaaaatgaagaacaatattatcaacattacgaagcttatcaacgttatcaacaacaactatcacgattcaatgatttatctacctatttgagtaatcacgaattctcttatgaagatagttctgttttaagcgaaaaaacaactgctcaattagaagaagaagatcaaatgttagctcaacaagttgatgattataatgataaatatttggagaaacaaactgaagtgagtgaactttcttcacgtattcatcaaatggaaacagataaaacactatctcaattgcgccatcaatattataatttaaaaaatagaatgaatgatattgctaaagattgggcgagccttagttatcttgagacactaatcaatgagcacattaaacaaattaaagataaacgactaccatatgtgatagatgaagccattaatattttcaaaacattaactgatggtaagtataatctaattacttatgaaaatgattcaattaaagttaaacatcgaaatggacaaatgtatcatccacttgaattaagtcaatcaacgaaagagttgctatatatttcattaagacttagtttaattaaggtgttgaaaccatattatcctttcccaattatcattgatgatgcattcgtacattttgataaacaaagaaaatcaatgatgttaaactatttaagagaattatctcaagaacatcaagtattgtactttacttgtacaaaagatactacgattccttctcgagaaatgctgatattaaataaaaaagaggaaggcggtaaacgatgagaaacgtagaaaaattaaatcctggtgattcggttgagaattttttcttaatccacagagcaacacaaggtgtaacagcacaaggtaaagactatatgacattatatcttcaagataaaagtggagatattgaagctaaactatggactgtcacaaaagatgatatgaaaatccttaaaccagaaataattgtatgggtaaaaggggatgttattaactatcgtggccgtaaacaaatgaaagtcaaccaatttcgattagcaacagcagaagatggagtgaaaacacaagactttgtagatggtgcgccactttcacctaacgaaattcaagatgagttatcacattttatcttagaaattgaaaatgcacatttacaacgtattacgcgtcatttattaaaaaaatatcaagataaattctttacttatcctgcagcaagttctcatcatcataactttgcaggaggattaagttatcatgtattaacaatgttaaaaattgcaaaatcattgtgtgatatctatccattattaaatagaagtttgttatatagcgcgattattttacacgatattggtaaagtaaaagaattaagtggaccagttgccacaacgtatacggtagaaggtaatttgcttggacatatttcaatagcaagtgatgaagttgctgaggcggcaaaagaacttggcattgatagtgaagaagtcatgttattgcgacatatgattttagcacaccatggaaaaatggagtttggttctcctaaattgccacatctaaaagaagcagaaattttattctttattgacaatattgatgcaaaaatgaatatgtttgataaagcatttaagaaaacagaaaagggacaatttactgaaagaatcttcggtatggataaccgtcaattttataatccagagaagttagattaatattaatagacgaaaaaaggtcggaacaatttgttccgacctttttgatttatgaaaattatgaagataatcctgatgaagcaccactactttgttgttcttttaatttttctggattaagtatagtatcttctacagattttttaatatcactatctttataatctacgttgtattcttttaataagtctttataagcattagtcaatagttttgggtttttttgaactttttgttcaataatttttgtttttaattgagatttttgtttgttgaagtcatcttctttattagctttgataatgtgatagccgtattctgttttaacaatgtcagaaatttgaccttcttttagtttaaataaagctttatcaaatttatcgaccatttgtcctttaataacataacctaatgatccgccttttttagctgaagcagaatccattgattcttttttggcaagttcatcaaatttatttggatttttttcaacttccttttgaattttttcagcttttgcttttgcttttttatctgataaaccttctttatcactatcagatttaactttaattaaaatgtgtgatgctttcttagtgtcatcttttatttctttgtcagaaactttgattttatcattaagtaattgtttttggtaagcagatagtcttttctgttctttgtaatcatcaagtgtcataccttgttgttttagcatactttcaaattgatctttaccaccatattgtttttcttcttttttaatatcatcatcgatacgcttagtatctactttgtctttatatttatcagctaatattttatttaactcaatactaaatgatgtgctggcaatttgatctttaccaattttatccataacatctttaacggttacattaccagcttttgaagaaattaatgtattatctttagaatctgtagaatcagaactacatcctcctagtaataaaacacctgctgtaacagggacaatgagtttattcataattttcatagttgatagctcctttgtgtatgttaacaaagttactataacataatataattattccaccaattaataaaagatgatttacaactaaagtattagatgaaaaataatttaaaaaaagtctacaatatcattcaatatcatagactttttaatatattcaaaataaccactagactctattttaattttgattgaatacgtttataattaccatctttatatcttagatatttgaatggaaggacacttttgtcagtaaattaatacctgtttggtgttcttcaacaaattgtccttcttttgaaaaaagaataatttttaaatataaaaaatccataactgataaaccaagatttaaggcaagtaagaacataaaataatgtccataacttggaaaatgataagttaggaaaattaaaatgcttgtaattattaaaaatggcaaaataagattaatgcaaaaataaaacttgcggacaggcgtattcacatacgtattaaaataaggaagccattttttcttattcaacttgtgccatctaaatgcatgaatataaggtaaaaagaaaaataaatgtattgttttgtgaatagggtacatgagaataataaataatattagaagtaaaaagtatttatctgataaaggcgtttttacaaaataatacataatctcataactaactaaaaacgcaataatagttgttacaatactcaaaaaagcaattcttggaacaccaaatcgcgcatgaatatctatatgacgtttacataaaaacatgactacacctcgaaaataggtcgtttaatatacgataggtattatctaactaagttgagttatcgtcaagataatttttaatagctattgtaatatagaacaatgtttttatattagattgtatatttataaaaaaagccataaagaaatctattaatataaatttctttatagccaaattgagctcaatgttagagttctatttgttattattcttatcttctgaaaatgtattactaatttcttcgccacgattttgaagattttcaatatgagattttaatttttcaatattaggattgatatcagatttaaaatctccgattaaagtcttaaattcgtttgcaatgtcgctgccttgttgtacaccgtcatttttcacttgcttactataatcaataatattatagaaactacgtttaattgtttcgatttctcgttctaattctgagcgagcaccagtaggaactttttgtccagaggcattagcattatatctttgttgatcacgattcatccatgatacggcaataccagaagcaagtcccacaccgataccaaataatacacgtgtaaccttcattttttattctcctcactattatgtcgtttatagaataaatcatatcattttatgaagtaagtaacgattgacttaagttacttactataattattacatcgacatattgatttcattttatattacccgtaaatgatattcaatatgcagaattattcaaattgagctttaatttgttcagcaatatcttttttctgttcatcgctaatttcgttttcatgagtttcccattgataaccaaaaccatcaatatcatctttatatcgtggtaggaaatggaaatgtaaatgaaatactgactgatcagcatattcaccattattttgaataatatttaatccatcaggttgaaatgcttttttaatggcatttgctacttttggaatagcaactccaatgtgtttcattgtttcttcatcagtttcaaaaatattaggagaagctttcttcggaattaaaagtgtgtgtcctttagtaacttgagaaatatctaaaaatgcataaacataatcgttctcataaaccttatagcttggaatttcaccagtaagaattttaccaaaaacagtttctgacataattacatgcactcctttaacctatttttactcattattataacattgttattttaaaaattcgctaatgagttatagcaaactttagtagttatataatgattttggtacaatataactcatggaggtgccttatgacagttaaagttgaacatttaacaggaggatatggtaaacgtcctgttattgaaaatataaattttgaattaaaaaaaggtgaaatagtaggattaattggtctcaatggcgctggaaaaagtacgaccattaagcacatgcttggattattaacgccaatggaaggaacactttcaatttcagataccaatattaatgatgatattgaaatctaccgtcgtaaactatcctatattcctgaatcaccagtcatttatgaagaattaacattagaagaacatatagccatgactgctatggcttatcaaataagtaaggaagaagcaatgaaacgtgcgcgtcctctactaaaaacatttagacttgaaaatgaacttaatgtttttcctagccatttttcaaaaggaatgaaacaaaaagtaatgattatatgcgcatttattgtcaatcctgaactttatattattgacgaaccatttcttggtttggatccattaggtatacaatctatgcttgatttgatggttgaaaagaaaaatgaggggcgtacagtactaatgagtactcatattcttgcaactgctgaaagatattgtgatcgattcattattttagatagaggaaaagtggttgcttttggaaatctagaggaactacgagaacaaacgggtcttaaagatcaaactcttgatgatatctatatccatgttacgcaaggtggtcaagcgacatgaataatgaagccatagcattatttaaacaacgttatgatgcaataaagaaagaaaaacattattataataaatttatttttaatggtcattttactgtattcttagttattttattaggagcctttatattaggttatggtcaatggttacaacatattcctaaaaatatagattatgcattcttagcaagtattgtaattgctttaacttcaatctttccatttcgaacatttttaaaagatgctgacaagttatttttgcttccttttgagaagaatatggaagattatataaaattaggcctaagatatagttattttaatcgtataatattgcaaatagtgttattaattgtattgtttccattattttataagcttaatcaacaattagttgtatcttatatcgtgatgagtgtattagcgcttattcatcctattttaggattacgcttaaaatggcaatggtatcgtgcgagattgtctcaatggatattaaatatcttaatattttcacttaattttataacgtattatctagttttagggaatcaattatattttgccattttattaacaataatattctttggcatggtgtatcttatacctaaatttaagagtcttacattatttccatgggaacagttgatttcagtagaagaaagacatcatacaaattattataaatttgtaaatatgtttactgatgttaagcatttaaaagaaaatgcagcaagacgcaaatatttagattttcttttacccacacccaaaggacgccgttttaattcgcacaatatgtatctttatttatttgtgagaagttttgtaagagggaaagatgcattaagtattattcttcgacttgttatcattgcacttgtacttatgatttggctgtctcatccacttgtttctattattattggtagtttatttatgtatattattttattgcaaatgtctcagttttatacgcagcaagcgtatggactatggcctcaagtttggcctgtatcagatagtaaagtaatcaaaggatatgaaaaattcttatatcgccttatgattatgataggtattattttcgcaatcatttttatcattttttatatgaaatacttcttttttgcaattgtattctttattgtaggatggttgacgattagaagtacgattaaaaaattgcaatatcaggaaactttattaagagattaaaaaaagagggaacttaagatgtattaaacacatacttaagcgtcctctttttatgttaatcgttaataggatataaatatctttcaaaataacttgaatgttgactgcttgagccaaaataatgtcttaatgcttctttagaaaaataatcattaaacatatcagatgatttaaaatcttcgtatgtttgacgactagcgaagccaaagtaaattttataagtagtaccttcttcaggtcttaagaaacgataacttttaaaaccagcaaattgactaaaatctaaattcaaatttgaaagacgtttttctagttgattgacatgatcatctgaacttggaatgaagatagctgaatagaaatgttgattattaagttcatttatttcattaataacttcataagtagtaggatgtttaagtatagatttatcttcggattcttcgataatgactgaagaatcattagttgaataaataaacagatgattctcagaatgatttaaacgaatttgatttaaatagtcataagttccataagttgtatatattttcataagctatacctcctttatttatgtatattatacgattaaatgataagactagctattataaataattaaaataagaaaataaattgtgaataatttatttaaatcaattcacttataattacaaatttaaaattaaagaatagatagaagtgctttgtcatttttatgacatttaatatttaagaaacgcgaaatcttttatgttgtgatattatgaataagaatgattttaatttaggaggacaaaatggtgcataaaaaaaataatacaattttacaaacaattaaaggggaattaacctcacacacacctgtgtggtttatgcgccaagctggcagatcgcaaccagaatatcgcaaattaaaagaaaagtattcactttttgatattacacatcaaccagaactttgtgcatatgtaacacatctacctgttgataattacaatactgatgcagctgtgttatataaagatattatgacaccacttaaacctatcggagtagatgttgaaattcaatctggtataggacctgtaattcacaatcccattaaatctgtgaaagatgtggaaaaattaactcaaatcgaccccaaaagagacgtgccttatgtgctagaaacaattaaaattctaactgaagaaaaattaaatgtacctttaattggatttacgggtgctccctttacattagcatcttatatgattgaaggcgggccgtctaaaaactacacatttactaagacaatgatgtatggcgatgaagagacttggtttgctttaatgaatcatcttgtagacgtttcaattaaatatgtaactgctcaagttgaagcaggtgcagaattgattcaaatttttgattcatgggtaggcgcacttaatgtacaagattatcgatattatataaaaccatttatggatcggttggtctgtggaattaaagaacaacataatattcctgttatattatttggtgtaggggctagtcatcttattaatgaatggaatgatttaccaatagatgttctaggtttagactggcgtacatctattttgcaagcaaatcaattaggtgtaaataaaacattacaaggtaatttagatccttcattattactagcgccatgggatgtattagaacaaagagttaaagcaatacttgatgaaggaatgcaaagaggtaaacatatatttaacttaggtcatggcgttttcccagaagttcaaccagatacacttaaaaaagtaacacaactggttcatgattatacgcaaaaataaaattagaatcataaaaatttatttttaaaagggaaggttttaagaatgactaaaacagtaggtttattagtaatggcatatggtacgccatataaagaaagtgatattgaaccatattatacagatatacgacatggtaaaagaccaactgaagaagagcttcaagatttaaaaaatcgttatgaatttataggtggactttctccacttgcaggtaccacaaatcgtcaagctgaagcacttacagatgcacttaataaaacatatgatgatgtagaatttaaattatatttaggattgaaacatatttctccttatattgaagaagcagttgaaaaaatgcataatgatggtattacagaggcagttacagtcgtattagcgcctcattattcaagtttttcagtaggttcatataataaacgggctaaagaagaagcggataaatatggtatacaactacatcatgttgaacgttattatcaacaacctaaatttattaaatactggacaaataaagtaaatgaaacactagctaaaattccggaagaagaacatgatgaaacaattttaatcgtgtctgcgcacagtttacctaaaggattaatagaacgtaataatgatccttatcctaatgaaattaaagatacaatggatcgtttagaagcttctacaaatattaaacatgtagcgcaagggtggcagtcagaaggtaatacaggtacgccctggctaggacctgatgtacaagatttaacaagagaattatacaaagaacatcactataaaaactttatttatacacccgttggatttgtttgtgaacatcttgaagtactttacgataatgattatgagtgtaaagttgtttgcgatgacattggtgctaattactatcgaccagaaatgcctaatacaaatccgttatttataggtgcaattgtcgacgaaattaaaacagttttttaaaaaggaagggacatgttgtgagtaaaaaagttgcaattataggcgctggcattacaggtctagccagtgcatattattttaaacattataatgaagacatagatgtaactatttttgaagcaacttcaagacctggaggtaaaattcaaacttatcgccgcgatggttatactattgaacttggtccagaatcttacttaggtcgaaaaacgatcatgacagatttagcaaaagatataggtcttgaagatgatttaattacgaatcaaacaggacaatcctatatttttgctaagaaccaattgtatcctattcctggcggatcaattatgggaattccaacagatattaaacctttcttaaaaacacgtttaatttctcctttaggaaaattaagagcaggattagatttagttattccgcctattaaaatagaaaatgatatttcggttggtgaattcttcagaaaacgtttaggaaacgaaatgctggaaaatttgattgagcctcttatgggagggatttatggaacagatattgatcaattaagtttgatgagtacgttccctaatttcaagcataaagaagaatcatatggtagtttaattaaaggaatgaaatatgaaaaacgcgaacgtacaagaaaacgtcagctttatccgggcgctcctaaaggacaattcaaacaatttagacatgggctaagttcatttattgaagcactagctaaaaatgttgaacaaaaaggtgtacacatcaaatacaatacaccagtagaagatattcatattcataatgataattatgagattgttacacataatagtcgagagacgtttgatggtttacttgttacgacaccacatcaaacgtttatgaaatggtttaatcatgatccagcatttgaatactttaatactatggattctactacagttgcaacggttgtatttgcatttgatgagaaaaatattgaaaatacttataatggtactggatttgtcattgcgagaactagtcatacagatattactgcatgtacttggacgactaaaaagtggccatttacaacaccaaaaggtaaagtattattacgtgcgtatgtaggaaaacctggcgatacggttgtagacgaccatactgatgaagaaattgtaaatatcgcacgtcgagatttaagtaaaatgatgacgtttaaaggtgatccagattttacgatagtaaatcgattaccaaaaagtatgccacagtatcatattggtcatatgactcaaattcgcaatatacaaacccatgtaaaacgtcaatataacgggttacgcattaccggtgcaccgtttgaagcggtaggcttacctgattgtattcaacagggtaaaaatgctgttgaagaattaatagacgaattataaataaagcatagtaaataagcactttttagaggttatattttctctttaaagtgctttattttaaaataaatagtcattattaaggagaaaaggagaataagaaatgacagatgtgattattgttcactcacaaataggaaatgcacataatcattggtatcaatggttaaaacataacctagcgcttgaaggatataatgtacaattgtttaatttagataaagaggataacaaaaaattagatacgtggataaaggctatgaaacaacaaattaaaatcaatcatcctgatacgtatgttgtaacccatggctatggttcaatcgctgccttgaaatttattgaacaagtagatttaaaacgtccaatagaaggcttttttagtattgctggatttaaagaagatgcgcaagacattgatgaatctgttaatttagatcatattaccattgattatgatgagattaagaaaaaggttaaacactttcacggccttgcttcaaaagatgatgaacatgtatcttataaggaaactgaaaagttgttgcaagctttaggaggatcaattcgaattgttgaagaaggaggtcacttcctagaagaagaaggcttcgtttctttcagtgaactacaagaaaaaatgcaaaaatatatgacacaataatgttagagtgggaaagtatcaaatagtaatataaagagtaataaataattatgagattttataaccaaattaccccataaaataaattttttaagtttagcgtttttttacacaaattaatttatggtttttattgactatatggatattaatatatatactaataaagtattaaaaaaagcactactaaaaaataattatctcataattatttaaatttataattaaagtattgtaaaatttattttaaaaaagtgttgacattacagtgacttaaatgatatattaattaagtattcatttgaattactaaataatattagcgcgggatggagcagttcggtagctcgtcgggctcataacccgaaggtcggtggttcaaatccgcctcccgcaatacataattttataggtctcgtagtgtagcggttaacacgcctgcctgtcacgcaggagatcgcgggttcgattcccgtcgagaccgtcattacttttgacttatgattaaggttcagtagctcagttggtagagcaatggattgaagctccatgtgtcggcagttcgattctgtcctgaaccatttacactttggcggttgtggcgaagtggttaacgcatcggattgtggttccgacactcgtgggttcgattcccatcaaccgccccataatcgttattaagcgggtgtagtttaatggcaaaacctcagccttccaagctgatgttgtgggttcgattcccatcacccgctccatagtttaattattccgcagtagctcagtggtagagctatcggctgttaaccgatcggtcgtaggttcgaatcctacctgcggagccatggctccttggtcaagcggttaagacaccgccctttcacggcggtaacacgggttcgagtcccgtaggagtcatataaacagaagtgaaacatcgcttctgtttttttatttaattgaatagaggagagttgtccgagactggctgaaggagcacgcctggaaagtgtgtaggcgctttatcgcgtctcaagggttcgaatcccttactctccgtatcaaaagctttatatcatagggtttagacttagcaagtgtcaattatgtgtcaagaaaataattctctgacatgttgaccttgctctttttatgttcttactctccgtacagtagctcagaatggttattttccattctgggttttttatagctacaagtatttaactatatttatctaaaaagggtaatatcttttaaaaaataaaacaatcacaaaataaatttaaacatgaatcctgttaagtcatttaaaaatcgttataatatagtatgtataactattggaggaatgaatagtggaattttggttaaaagagcaaagtataaaaaacaaaaacaaaattgcggttacagatggtaagtatacattaacatataatcaattatattctgcagcgtatcagctttcaaagaaattattatctttaaatgaaagtagggtaggactatatattggaaacgacattgagtctattattttagtgcacgcatgttggttagcgcaaattgaaattgcaatgatcaatacacgattaacaacaactgaaatgaccaatcaaatgaactcagtgaatgttcaacttattttaactacaaaagagttcgatttacattcacatcaagttctctcatttaatcaactgagcgattatcctgatgcgcctaatcataaacaatttgatattcatcgtattgcatctattatgtttacatcagggacgacaggaccccaaaaagcagtacctcaaacgtttaaaaatcactatgcaagtgcattaggttgtaaagaaagtctaggatttgatcaacaaacgacatggttatcggttcttccaatttatcatatttcaggacttagtgtgattttacgtgctaccattgaagggtttactgtacgtttattaaataaatataatactgaagatatgctgactattattaaaaatgaatatcctacacatgtgtcacttgtgccacaaacgttaaagtggctaatggatgctggtttaaataagccatactcaattgaaaaaatattacttgggggtgctaaattatcatccacgctcatacaacaggcattgagttatcaattacctatttataattcttttggaatgacagaaacatgttcgcagttcctaaccgcttcaccagatatgttagctaaacgatatgatacagtaggtaaaccaagtgataacgttgaagtatgtattaaacaacctaatgaagagggtcatggtgaattacttatcaaaggtgacaatgtaatgaatggatatttgtatcctaaagatttggataacacatttgaagatggtttctttaaaaccggagatattgcagaaatagatagtgatggttttgtaatggtttatgatcgacgtaaagaccttattattagtggtggagaaaatatctatccttatgaaattgaaacagtggctaaaacattcaatggaattatagatgcagtatgtgtacctaaagaagatgatacttggggtcagattccagtactttactatgtcgcaagtgaaacaattgaggttaaagaccttatagatttcttacaagaacatttagcaaaatataaagttcctaagatatatcaacgcgtcaatgcattaccttatacttctactggaaaattacaacgtaataaagttggaactgaggatcattaaatgaaaattattgatatacaattttattactataccgcgccgtttcattctccgattacgacgcctaaaatcgaaatgacacatcgcaaagcacttatagtacgatttatttctgatgaaggggaaaattattttggtgaatgtaatgcctttgaaacggattggtatgatactgaaacaattgagacagtaaaaatacgaatacaacaatggtcaaaaaagattttaaatcaatcattcaatacatttagtgactggttaccttatcttgatttattagatagttatccggctactagatgtactgttgtgatggcggtttatcagatgttttattcacaaccgtgctttaacgttgaatatggtgcaacagtaagtggtttatcttcttcacaattacaaacacttaaagacacaaagccagcacgtattaaattaaaatggagttctcatctcattaacgacataaaaaagctacgcaatgaacttccatttgaatttaatcttacactcgatgcaaatgaaacactggatatgtcacaatttcaattattaaaagagattgatcaacacgatattctatacgttgaagaaccatttaaagatttaaatgatttaaactatatagatgttacgcattatcctgctattgctattgatgaaaaagcaacggatttacaatcaattttgaaaattattcatcaatatcctatcactgcagttgtggttaaaccatttagactgggaggaatagatagagcgctagaactcattcacttattaaaagagaaagatattaaagtgatcgttggtgggatgtatgaatatggactcagtcgatattttactgctttattagcaaaagaggggtcttatccaggagatattactccagatggatattattttgaaacagactttacacaaggcataggcaaattaaaagaaggattgatatatttcaatccccctaaaattaatataaatgcattatctgtttatgaatgatgatgtgtatgtttgtctttttttaaaggtaccggatcaaatccaccttcatgaaatggatggcattttaaaatacgttttactcccatgtagccacctttaaatgcgccatatacttctatagcttctttagtatattcagaacaagtaggatagaatcgacatgttggtggtgtcataggggagatgaaacgctgataaaaacgaatgatgcttagaaatgattttttaagcataaataaacctcctatagacatttgattattaaataattttaccacatttaagagggggatgagtaatatggagtttatcgatcaagaggatagacgagtcacgatgcaatataaaactgatgatgatataccgaacggaaaccatgttttagctattccgatatttcaaaatcaattattattcactaaacactctaaaagaggtatcgagttccctggaggtaaagttgaaattaatgaaacgagtcaacaagcgattgctagagaactttatgaagaaacaggtggaaagatagaagccttatattatatcgcgcaatatcaagttcatacctttgataaatcactttttaaaaaagatgtgtatgtgattaaagtgaaatccattgaacataaacatgactatttggaaacagagggtcctatattatttcatctagttaatgagattcctgagcaccaaaaaagttatttaattaaagatgaagcaattttaaaatgtttagaaagggtgaaagatcttgggtattacgaatattagaacaatgcctgttgaatccaacactcatcgatttgaggaactaacttatacagtagacgaattaagggtaaaagcgttacagatggtcccaatgtatcataatgttaaacgtattgtagtttatttacgtggtggaaaagggcaagttggtagagtaagagcttcaagacttatgcaattttctgatccatatacattagttataggaccctattatagaggaagtaatggtagtgaaggaaaagatgaattttgtaatgctgatttacatgatgtaacagtacttattcgactattaaaaaataagcatccccaagctttcgtccatatgattggattttcaagaggtggaattcaaggtctattatcatttcaggatgatccagttgatagctatattatttggggtggcgtttcagatattcatttaatgtatgaagaacgtgtagatttaaggggaatgctaagacgtatggtaggtcatccgaaaaaagataaagaggcatatgaacaaagaaatgcgatacgtacattgaatcaaaacagtccacctattttaattgtacatggtggtaaagattggcaagtgggtatacatcaagcgtattttcttcaagaacaactagaacttaaaggggtcaaacatgatacattttatcaacttgacgaaggccatgtaccaagaccgaaagcattgaaagaagttttagattatatacatcaatggatgaataatatagaacaagacttataaagatgactacaacggtcatctttgtaagtcttttgtttatatattattaatgactaaatccaccatttttagcaatatcttttacttcatctccaaattttttgaagttttcttcaaaacgttgttttaagtcattagcttgatgacgataagcctcaggatcattccaagcatggattggatttaaaatcgttttaggcacatcttccatttcaattggtatacttaaaccaaatatttcatctttagtaaatgtagcttgttttagtttgccagaaatagcttgatctaccatataacgtgtataatgtaagctgatacgacgtccaacaccatattttccacccgtccatcctgtatttactagatatacatcaacatcatggtcatcaattagcttaccaagtaaattcgcatatttagtagggtgcaaaggtaaaaatggagcgccaaagcatgttgaaaatgatggttcaggttctgtcacaccacgttcagtgccagctaattttgacgtaaaaccacttaagaaatgatacatggcctgagatttagataatttagaaataggtggaagtacgccaaatgcatctgcagttaagaaaataattgtattagggtgtgcggctttagaaggtaatacgatattatcgatatgatgaattggataagcagcacgtgtgttttctgtgttcgtattatcatcaaaatcaacatggccacgttcattaacaattgtattttcaagaatagtaccatattgaatggcattataaatttgaggttctttttctttagataagtgaatggcttttgcatagcaaccaccttcaatgttaaaaataccatttttattccaaccatgttcatcatcgccaattaatttacgatttggagtcgctgataatgttgtttttcctgtaccagataatccaaagaatagagcaacatcacctttttctccaacattggcagaacaatgcatactcataatatcttacataggtaataagtagttcatcactgaaaagataccttttttcatttctccagcgtattcagtaccaccaattaaaatcactttatgtttaaatgaaacaataataaatgtttcagaatgagtaccatcaacgtctggattagctttaaaatgaggggcagaaacgatagtgaaatttggcttaatatgacttgcttcctcaatagattcaggtcggataaacatgttttgggcaaataaattatgccatgcaagctcattgatgatttttaattttaattgtgagtctttatcacttccggcataaccgttaaaaacgtataattcctctttttgatctaaataatctaatactttgttgtataaatttaaaaacacgtcttcatctataggttgattaatgtctccccaatcaatattgtctcgatatgaaggttcgttaacgataaatttatcttttggtgaacgaccagtatatttacctgtactcatattaattgcgccaagttcagtaagttgaccttcattattgtttaaaattttgtaataaagctgagtagtagaaagttgaaataaagttgtttccttttctaataagtgtttgattttaggtgtttcactgtatgtatctattgacatacaacatccctccaaatatctattcatttattaatgtaagcccttacattaaaatagtataacataatgatttaattattccattgtaaataaaagaacatttaaaattcaaaattgacaattctaatgtatttatgtagtataggtcttaacggattctcttatcctgagtggtggagggacatggacccaatgaaacccagcaacctctttttttaaaagaaaggtgccaaaccgtttgcagacgcaatatttgtctgaacgataagagcgaatggacgtttaagagccttctctctatctaggtagttgagaaggctcttttattttaagctcattgtcaaaagagaattttcgtaaatatagttaagaaaaggagcaaatcatgacttataataaacgtttatttacatcagagtcagtgacagaagggcatccagataaaatcgccgatcaagtatctgatgcgattttagatgaaattttaaaagacgatcctaatgcacgtgtcgcttgtgaaacaacagtaacaacaggtatggctttaatttctggtgaaatttcaacgtctacatatgtagatattcctaaagtagtacgcgaaacaatcaaaaatattggttatacaagagctaaatatggttacgattatcaaacaatggctgttttaacagctattgatgaacaatcacctgatattgcccaaggtgtagataaagcacttgagtatcgcaatgatatatctgaagaagaaattgaagcaacaggtgccggagaccaaggattaatgtttggttatgcaacaaatgaaacagaaacatatatgccgcttccaatctttttatcacatcaactagcgaaacgcttatcagatgtgcgtaaagacggtaccttagattatttacgtccagatggtaaagttcaagtaacagtagaatacgatgaaaatgataaacctaaacgtattgatacgattgtggtatcttctcaacatgctgaagacattgaattagaacaaattcaaaaagatattaaagcgcatgtcatttatccaactgtacctgaaggtttaattgatgatgaaactaaattctttattaatccaactggtcgatttgttattgggggtcctcaaggagacgctggtttaactggaagaaaaattatcgtagacacatatggtggttatgctcgtcatggaggcggttgtttcagtggtaaagatcctacaaaagtagaccgctctgccgcatatgcagctagatatgttgcaaaaaatattgtagcagctggattagctgagcaatgtgaagtgcaattagcttatgcaattggtgtagcagaacctgtatctattgctattgatacatttaaaactggtaaagtttctgaaggccaattagttgaagcggtaagaaaacactttgatttgagaccagcaggtatcattaaaatgcttgacttaaaacatcctatttacaaacaaacagctgcatacggacactttggtcgtactgatgtattgttaccatgggaaaaattagataaagtgaatgtcctaaaagatgccgttcaaaaataatgtaggatatacatcaatcaattaggttaaacctcgaaattatcgtctatttctattataatagatagatattgacagtttaaaaggagcgttatctaatgaattcatttggaccgattgagattggtttaattgtagcgataatcatagcgattatatgttttattctatttttagttgccttgaaaagtaaaaataatatgaaacacaaagcgagtgaagaatacaatctcaaggaacaacaactcaaatcttcacatgaggaagcacttgaaaaagaacgtattgaaaataaaaaacaagtaacgaaacaaaaagaagaatttgaagctacagttaatggaaaagaacgtgaaattgatgctttgaaattattttctaaaaataaaagtgaatacgtgactgatatgagactcattggtattagagaccgtttagttaaagaaaaacgtattagacgtgaagatatgcatataatggctaatatatttttaccaagtaatgagtttaataatattcaacgcattagtcatcttgtgcttactagaactgggttatatatcattgattcacaattattaaaaggtcatgtgtataatggaattagcggcgcacaatttcaagaattaccaatgctgaagcaagtatttgatacacttgatttaaacacacaagcgcctcaaacgttagtgcttgatcaacatgaagataatcattcgaaactatcatttattaattattctgatcaactttctgcaattgagaatttagctacagatttacaaacagaattaggacttaaatataagccaacatcaattttatattttaatcctaaacatgataaagacgtaacgatttcaaactattcacaaagctcaagtgttaaggttttagttggtcctgaacaacttgacgaattctttaacaaatttgtattccatggacgtattcaatataatgtcgatgaattacaaaatattatggataaaattgaatcatttaactaagagaggctaccatcaaaatttaaaattttgatggtactttttttattacaagcgatgttcataaatatacttttagggtatatacagaatagttatttttaaaggaggaagtaaaatggactatattgaattctataatggaaatcacatgccaatgttaggacttggaacatttcgagtagaaaacgacgatacttgtaaagaagcagttaaacatgccattgaatctgggtatcgtagcatagatactgctaaagtatatggaaatgaagaacaagtaggccaaggtatcaaagaaggattagaatcaacaggtttaaatagagaagatattttcgtaacatcaaaattatttttcgaagatttcggacgtgaaaatgtggctcaagcctacgaaactagtatccaaaaacttgggttagattatttagatttatatttagtacattggccagggacaaatgaagccgtaatgattgatacatggaaaggtatggaagatttatataaagataatagagttaaaaacattggagttagtaatttcaatccagatcattttgaagcattattagcacaagtttcaattaaaccagtcattaaccaagtagaatttcatccatactttactcaagaaaaacttagaaaatatttagaagcgcaaaatatttatatggaatcttggtcaccatttatgaatgctcaaattttaaacgatgaaacgttaaatgaaattggtaaagaagttaataaaacagcagcacaagttattattaaatggaatatgcaacataatgtcgtcgttattcccaaatcagttacatcaagcagaattgaagaaaatatagatgtatttgattttgaattatcagcagatcaaatgaaacgaattgatgatttaaataaagatcaacgtataggacctgatccagatacatttgaaggttaatcaatttaattaaaaaagagtgaacttgtaggttaatttactacacagttcacctttttgttatattataaaaccaatccaacaagcaataaatcctataacaaattgcaatagagaatacatcataaatttaaaaagtttgaaagacggtgttagacattgcgcaagctcataagacatggttgaaaatgtcgttaaacctcctaaaaatccggtaataaaaaacatatgtatccagtttaagtgaatagagagcccagtcgttaaaccaatgagaaaacttcccatccagttgacgattaaagtagcaataggtattgaagtagaccatttggatttagtgacatcagttagccatgctctaacgacagcgccaaaaccaccgccaatcataattaaaagagcttgtatcaagatgtaagacctcctaatttcatacctatccagcacaagataacaccaaagcaataactcataaacgcataaaccacagctaagataatatgatggctgtaaagtaatgtgactaactcaaattgaaatgttgaaaaggttgttaaagcgcctaaaaaaccagttgtaataccttttttaattttaggatgatctttaaataatttaatcattactacagatagataacccataagaaaagcacctgacaggttagctatcaatgtgccaattggaaagatgctactctgatttataaaggaaaacaaaaatcttaataaagcgcccaacataccacctataaacacggttaaatattgcatagtatactcacctttatataacattttatgtgtatttgattatgaaaaaatgccaaatgttgtaacagaagcaaaaatatggaacaaaattactactaatatgacataaggtaatattttagaagcagtcttaaaccaatctttatttttataatttaaatgtttaattgctttatcagaaaatataattgaagcaataaggatgataacatttacaatactacatgcaattaataaattttttattgatttaaattgaatacttaataaaggattaaatgtattaaaataaaagctaataattaaaagaatcactgatatatataaatatttttttgatttagacataacatacctccgatttatatcattaaataatattaccacatttaatttcatttttaatagtacctttatcataaggttttaattttcagaaaattcaaagcaaaacattcgcatacacaaaaaaagcatgatataaataacataacgaaatagtaaaacatactgtacataaaaaataattatacatatggtgtcttttcataaagcaagctatattcgtaatataaatgagaagggaagattttatgactcaattaaatgtagaagtatttgctgatggtgcagatatcgaacaaatgaaagctgcatacaaaaataaagaagtagatggttttacaacaaatcctagcttaatggcaaaagcaggtgtaacagattataaagcttttgcagaagaagcagtacgtgaaattcctgatgcttctatatcatttgaagtattctcagatgatttagacacaatggagaaagaagcagaaattttaaagcaatatggtgacaatgtgtttgtaaaaattccaattgtgaactcaaaaggtgaatctacaattgaattaattaaaaaattatcagctgatcatgttcgtttaaatgtaactgctgtttatacaattgaacaagttaaagctattacagaagcagtgaccgaaagtgtacctacatatatctctgtctttgcggggcgtattgctgatacgggtgtagatccacttcctttaatgaaagaatctgtaaaagtcgcacatagtaaacatggtgttaaattattatgggcaagttgccgtgaagtgttcaatgttattcaagctaatgaaattggcgccgatattatcacttgtccatcagatgttgttaagaaagttaacaataatcttggacgcgatattaatgaattgccagtagatacagttcaaggatttgcaaaagatattaaaagttctggactatctatattataaaatcactatatctaaattatgaccaaccgagtctaagactacaaacatgtcttagactcggttttagtgttatatgaatatcaaagagaaggagtaataaagtatcttgagttgtatctttattttttattgagtttgttttaaaatcggtgttcagttaaaatttatgaatataattaaatagaaaggaattaagttatggaggaaactgcttttagagaaaaagtaagaaaacaattgtggtttttaaataaaaaagaaaagcaattattagaacatacttttgaacaaaataatgcttcatttaataatgcagaacagaaatttatgaaacctactcgttttgctaatcaatttttacaggttcatatctttcgaaataaacatttttcaaatggatatttgttcttattaattatattatttgttctcgcatacatcctattactaggatggtttttagctggatttatcgcaagtttagcagtagtcaatcaatttataaatcctaaagcagaattaagtttaatctatcgtgtattaatcttagtttttgccattattagtttgattgtcagtttgtatctcataagatttgtgactgctttgtttactaaaagattacttgaatataagtttaatgaaaagaagtcgtcttattaattaaataggctaatagaatactttcttgccattttttataaactaaaatgtaaggctcatcgactatgcattgaactgaattatcaaagataataatggttttattttgagaagacgttaatccaataatacgttgagcattaaaatatatttgtatgggtgcgcgttgatgtttgattggaaataaaatgatgtctttagaaatataaataggaactagtttattgatagataataagcgtttagctaatttaagttgttgcgtatatgatttattaaattgttctagatagtatatgactatctttttaatatgaaatggtagaatcatttcatatgttttaaaacaacatttagtctgaattgttgaaccttctaaagtttgaatgtataacaaatcgaaagtattatgaggtaacatgccaatcaccttctaaataatattgctgaagtttgatacgggcagaagatttatattttttaattgtagtgtctgagacattcatctttttagcgatttcatattgtttgtatccatgaagataatatatcagccattgatattcatttgaatttaaaatatatttgaaatcattaaaaaaagattcatctttcaatgtataagttaaagaatgaggtaacgctgcaatatctaggcaatcaatcttcaattgctcctttctaaaaagatcaataagataaaactttaatcgctgatagataaaagaggacaaagatacagaggaagatgggttataaattttggagatttcccacaattttattaataatagttgataaaattcatcataattataagtgatacggtattgtcttaacaaatgatgaatcatcttatgatattttatgtgtaatgaactaaaatctgaaatatttattctttctccttagttatgtacataaacaatatttccggatgtataaattctacatgaggtatcgtgaatttttatttgcttaatttaataaataggtgttaaatagtaaacatagaatcgttggattggatgatatatagctttaacaagtttgtaagattaatattcgacatttgtacaataaaatataggaggtatgaagttggattacgcacatttaaatcttgagcacttttttgcaagacatgatgatttagacgttattagagatcgttctgaatttgtaatgataaataattttacaaatgaaatgatgtatcgtgatggtgatattgaagggacgattgatttaaatcaatattattataaaaatagatcgcaagctgtcagttttattatgatggattataaaagaaataacgaataattaaatatgttaaccttactacaaataactatatttatttaatagataaaaatcattgagtaatgaaatgttgagtatttcattacttttatttttttgttaaatttcaattttgttacttttattttatgaatatgtaacattataattataaaattgtttaagagaattaaaaatgttaaaatttattatcatggaagacttttctataaatgaaattacaacattaacctaagaggtgtgaatatgacaaagcacagaaaaggttctattataggcctaatagggttacttattattttagtagcagctggcttcatttttttctcaatgatttctgatcagatatttttcaaaaaagtaaatgaagtagagaaagttcagcatgtgaacgtcacgcttgataaagctgctgcaaaacaaatagataactatacaagtcaacaagtatcgaataaaaataataatgcatggagagatgcatcagcaagtgaaattaaagttgcaatggacagcagtaaatttatcgatgatgataaacaaagatatcaatttttagatttatctaaatatcaaggtattgataaaaatcgtatcaaacgtatgttgttcgatcgacctacactattgaaacatactgatgcttttgtaaatgctgcaaaagaaaaacgtgtcaatgaagtctatttaatttctcacgcattattagaaacaggttcagtaaaaagtgaactggcgaatggtgtaaatattgatggtaaaaaatattataatttttatggtgttggagctttagatgaagatccaatcaaaacaggtgctgaatatgcgaaaaaacatggttgggatacaccagagaaagcaattaaaggtggcgcagattttattcataaacacttcctatctcacgatgatcaaaacacattatatagcatgagatggaatcctatgaatcctggtgaacatcaatatgcgactgatattaaatgggctgaaagtaatgcggaaattattgctgatttctataaagaaatgaaaactgaaggtaaatacttcaagttgtatgtttataaagatgatcaaaaacatcaataatcaaaataaaaaccaacattatctttttaattagatgatgttggtttttttatttattctgctttgttttttcttgaagcccaagtaaatccaatgataaaaacaattaatgtttttaataaaaatttcattgtttagtcacctcaatatttaaattttaacatagttacacatgattatttatgctttgaaatggataatcgtgttaatagtgaaacgttttgaagtcgagaatcgtattggtataatatgataatattcaacataatacaaatatataaaaggatgatgttaaatatgcgagtagcaattataggtatgggtacagcaggtgtgagtgtacttagacaactcgttaaacataaagactttaagcaattaaaagtcgatgtctacgataatgaatttaatatggggcagggtgttccttttcaaaatgatagtagtcaattattaattaacttacccactaaaaatatgagtttaaatctagatgatgatgaagagttttggaaatggtatcaaacacaatctgattttacgtttaaaaatccaaagtatttaccaagatttgtttttggccattatatgaaatcatacttatcaaattatgagacattatatgataaccttacagttattaaacaaccagtacaagaagtcttcattaattcaaatatagatgaaaccacattgaaatattatgtctgtacgtctaaagatatgaagcattgtcaagtatatgattacatatttttaactataggtactttatcatatcacgacccttatcatttaaaaggcataaaaggttatattcaaactccttaccctacatataatactttagatgatgtacaagaatctgatgatattgctattattggaacaggattagctagtttagatgtagtgcgttatgtagcgtttcatcaccctaaactacctatcacaatgacgagtcgttctgctcaattacctagcgtaagaggaaacatgaaaaaaattgagtttcaatatttaacgaaatctaaatttaatgatattaaagataagtactttggaaatgtaccattagagaaagcattcgatttatttaaagaagagtgtgaattaaatggtattgatttacagaaattggttcatcgccgaacaggggacacgattaaagatttaaattatgatttagaacatcctaatgagataggtatattccaaacattaatagagaatgtcaaagaaaatttaaattggatttggaatagttttagtcgtcaagatcaaattgaattcgataaacgtttcactaaaattattcaacttaactcaaatcctatgcctccaagaactgcaaaactcatcaagcaattaataaaagatggttcattagtgattagaaaggatttagaagatgtggtacataaaaatggaatatttaatttaaaattcaaacatgatgaacaatggtatccacatcatattattattaatgcaacaggttctaaaacacatttaaaagatttagatgaagatgatcaatttatcttaaatcttcaaaatcgacaaattattcaagctcatcctatgggtggaatacaaattatcccagaaacaaatcaggtgattagtccaagatatggtactttaaataatatgattgctattggacaaatcactaatggagtaaataaattgcgtaatggagtaaaaatgattgttaatcaagcggtaagtgcagtggattacttatatgaaattcgaaaagaatttgatcataaagcataatgctttacacaataatgaataaatgtctctttaagagttaaatttaaaaatcaaattgaaattctttatttgtaattttccaaaaataaatgtaagatgatatatgtagcactaaactacaatgactcaaatttaatcacaatttcatacgtattctttcggggcagggtgtaattcccaaccggcagtgattaagcctgcgacccacttaatcttaatttattaagtggctgatctagtgagactctagagccgacagtaaaagtctggatgggaggaagaatcaatcacatcattactgaatgatgtataagcatgcacaatataaaaattgtagtacgcttatttaagtatatatacatgccctatgcctgtgaaacaggtatggggtttttttagaggtgataaattgagtgaatttatgaaatatgcaattcaattagcacaaatggtggaaggacaaactggagttaatcctcctgttggctcagttgttgtgaaggatgggcgtattgtgggactaggtgcacatttaaagcaaggagagaaacatgcggaagttcaggctttagatatggcacaagataaagcaaaaggcggcacaatttatatttctcttgaaccttgtacacattatggatcaacaccaccttgtgtgaataaaattattgaacatgggcttagtaaagtgatttatgctgtaaaagatacgacgttatcttctgagggagatatcattcttgaaaaagcaggtattgaagttgagtatcaatattcagaagaagcttttgctttgtatgaggatttcttcaaagcaaaacaacataaaattcctgaaattacagtaaaagtctcgacttcgttagatggtaaacaagcgactgatagtggacaaagtcagtggattacgaataaagcagtaaaacaagatgtatatcgtttaagacatactcatgacgcagtattaactggtaatggaacgattgaagcggataatccacaatatacaacacgtattcaagagggtaaacatccaataagaatcatactatctaagcgaggccaaattgattattcaaaacagatatttcacgatcaattaagtgaaatttggatttatactgaaaatcatgaattaaaaagtccaagtcatcatataaaaataatctatttagaaacatgtaatttaaaatctattttatctgatatatatcaaagaggtgtcggcagattattagtagaagctggacctcaaataacttcagaatttctccaatctaattatttagaccatcttattatttattatgccccgaaaataataggcggtattggaaaaaatcaattttatcaaactgataatgtcattgatttagctgatgcgccacaatttgaagtgatttctaccgagtctattcaacaaaatattaaaatgacactgcgaaagaagtgaagataaatgtttacaggtatcgttgaagaaataggtactgtaaaaagtattcgcactcaacaatccgtaaggacattagatatttcatgtcagaaaatcctagaagatatgcatattggtgattctataagcgtaaatggtgcgtgtttaacagtcattgattttcaacaaaatcaattttctgtccaagtgattaaaggtactgaaaataaaacctatttagctaatattaaagaaaatgatgaagtcaatcttgaacgagcaatgtcaggtagtggacgtttcggaggacattttgtattaggtcatgtagatgcaaaaggaacaattataaatatcagagaaacgcctaattcacgcattgtatctattaaggcatctgactcggttatcaaacaaatggttaagcaaggttctattactgttgatggcgtaagtttaacaatttttgacttgcatcaacatagttttgatatccatcttattcctgaaacaagacgttcaacgattctttctaacaaaaagatgggcgatgaagtgcatcttgaaacagatgtattatttaaatatgttgaaagtatagttggtaaaaataaatctgatttgtcagttgataaattaaaagcatatggtttttaggaggggcttaaatgaaattcgatagcattgaagaagcgttagaagcattaagaaatggcgatagtattattgtagtagatgatgaaaatcgtgaaaatgaaggtgacttaattgcggtcactcaatggatgaaagacgataccattaattatatggccaaagaagcgcgtggattaatttgcgctcctataagttcgcagattgctgaacgtctaaatcttaaaactatggttgatggtaatacagatgactacggtacaaatttcactgtaagtatcgatcatatctctactactacaggaattagtgcatttgaccgtacagcaacagcgaaagcgttaattaatcctgattctaaaccagaaagtttccataaacccggacatttatttcctttagtgtctaaggaaaaaggtgtattagttagaccaggacatacggaggctgctgtagatttagctaaattaacaggtgctgcacctgctggagttatatgtgagataatgaatgacgatggtacgatggcaaaaggtaatgaattacaacaatttaaagagcgacatcaattaaaaatgattacaattgaaagtttaattaattatcgtcgtaaacaagaaagcgaagatattgaacttaaagcaactgtaaaaatgccaacggatattggtaattttaaaatgtacggtttccaatctcaatatacacatgaagatattgttgtacttggcaaaggagaaccacgtacaactgaaaatgtaagactacattctgcttgtttaacaggtgatattttccacagtcaacgatgtgattgtggcgctcaattagaagcatcaatgaaatatataaatgatcatggcggattaattatttatttaccacaagaaggtagaggcattggtttaatgaataaactaaaagcttatgaattaattgagcaaggacatgatacggttactgcaaacttagcattaggttttgatgaagacttaagagattatcatatagctgctcaaattcttaaatattttaacgttcaacaagttaatttattaagtaataatcctaagaaatttgaaggcttggaagattatggtataaaagttgcagagcgtacagaagtgattgtgccagaaacggaacataatcatcattatatggaaacaaaaaaatcgaaaatgggacatcttatttaggaggaatttagaatgaattttgaaggtaaattagttggtacaaatttaaaagttgcaatagtagtgagtagatttaatgattttattaccaaccgtttattagatggagcgaaagatacattagtaagacatggtgtagatgaagataacattgatgttgcatatgtaccaggtgcatttgaaattccacttgttgctaaaaaattagcgcaaaaaaatgattatgatgcagtgattactttaggctgtgtcattagaggtgcaacatctcattatgactatgtttgtaatgaagttgctaaaggcgtatcaaaagcaaatgatattacgaatacaccagttattttcggtgttttaacaactgaaagtattgaacaagcagttgaaagagcgggtacgaaagcaggtaataaaggtgcagaagcggcagtaagtgcaattgaaatggcaaatttacttaaacagttttaattaatgcagagcgtctcgataattttaaggattatcgagacgctctgtatttcaacgttttagtaatttcacaacactagatactaatgtaagtgttcctaaagttagtccactaactaaaccaatttttttaagtgcttctgttgaaataaattcttgataggcaagggaaagattttgaggtctttcagccaggcgacgcatgaaataagcaaaccagtcattgccatatggaacataaacggtaaagtgatatccttgtctagcaatctcttctgctaattcattacgaaaaccatacaacatttgaaattcaaaagtgtttttttcaatatgatgatcttttacaaattgtttaacatggttaatgatgttatcatcatgtgttgcaattgacgtaaagtttttggcgttaagtaaacgtttttcaataatatttatataatttttgtcaatatcttttttactttgataagcaatcgtatcattttctttataagcacctttgaccagtcttaatcgtaattctgggtacttatcaattaatttttctgcctcaaaaaggtatccttgaataactgtaccgacatttctaaattctccttttaatctgtctaaaatttgtaatgtttgtgataagctattatatttttccatatcaatattaatatgcatattatcataggtattagcctttaataaaatttctcttaaattttggtaggctaactcggtatcaaattcaccgcctaatgaactcactttcaccgacatatgtgcactcacttgatatttattaatagcttccattatctcaagaatctcatttttagcttgagtcgctattgctttattattaacaaattctccaagattatctatagtaacatcaatatgtttagcgtttaaacattcaatcgtatcaatgagttgttctatagtattacccgcaacaactctattagcacccatagtcggtccgattcttttagccatttcatttaaatatgtactatttgataatgttatgaaaaaatctctgaataaagacatatctattcctccatcccactcttatctatctctataacaagtttagcatgaatatattacttaagaaagcgtttacataccgaagataacatccgtttaaattcattagtcataaattaagaaaatctaaatactgtttaacaacaattaaaggtataatttgatataatacatttgataaacattcaattagagaggattcaaaaatatgtggaagtgggaaacagaacatgacgctaaaggcgtaatcatcatagtacataatatgttagaacacactggtagatatgcgtatgtgattacgatgttgagacgtaatggttatcacgtaattatgggtgatttacctggacaaggtcaaacttcacgagctaacagaggtcaactgcaacgatttgaaatttatcatgaacagttagttgaatggataaaaattgcaaacgaatacaaattaccaacatttgttatgggtgttggattaggtggtttaattattctcaatttacttgaaaagactgaactacctattgaaggcatattactactctctccaatgcttgaattaaagaaaaattataaaacacgaaaaaatatgtttatatctaatattggaaagagctcaaaagatacacaatttaaattaggaatagattatgaagatttaactcgtaattcagaagtgattgatgagacaaatcatgacggattgatgttaaagaaagtatcttacaaatggtttaacattattaatgaaacaatgagagacacatcacaacatattaaagatatcaaaccgttacccactttattaatgtatggtactgaagataaaatcttagaaacgtcttcaatagatattttaaaacaacaatttcttgcagatgaattttattttaaagcgtggaaagggttttatcatgagattcacaatgaacctgaacgagatcaagtcatgagatatatattaactttcttgaataatagtgtaaatacaatgggatttattgtacaagaagaagacattgaggaaatataagataattttttaaaaacctataaaaatagctcgtagaagacagggatctacgagcctattctatatcaaaaatatggtgataatattataaatgagttaaaattacaatataagtagaattataactaccaattactttttataaattggatgaatttagtattagatttataatataaatgttgaattaaaaaatatagttgatatattattgaaaaataaattgtattgaatttttaaaaacgccaaatcgtataaacttaataataaattgaattataattattatacataatatgagagatcaaggggaatgaattatgaaattacaaaaaaagaaacggtatccatggtattgaaattagagaaattattgaaggatatagattctatatttagaattatttatgagaagtatcatttaaataaagaagaagtacttattttattaacgttatgggaaaaggggcctatgacattaaaagagatggatcaatatgttaatatcaagtcatataaacgaacaagaacgtataataatttagttcaatctgattgggtttacaaagagcgtcccattgacgacgaacgtacggttattatccattttaatgaagaaaaaaataaatatagaaatgaattattagattttattactactattattaaaagaaaatatgaatctttagaaaatagtttgaattcattgatgagcgtttaatataaaaaacccataaattaaaactacgatttgatgttttaatttatgggttttaaaatttagcgtttttcaatcgcacatataaaaggtgcatgattaacttgattgataaattgatattttaatatgtgtgctttactttgatcaaagttttcgagatattttaataattcatctctttcgatttgtccttccttatgtccatgataaattactagtacaataataccttctgtacttaatagtttaaaaatactttcaatagcttgaatagttgtttcaggtttagtaacaatagttttatcacctttaggcagatatcccaaattgaaaatagctgcattcacgtttccgatgacatcacttggtatatcatttaagatattttcatgtccatcatgtatcaacgtaacatgtttaaaggatgctattttttcttttgtatgttcaatagcttctttttgtatatcgaaaccaaacactttgccatttggaacctgttctgctaaaaatagggtgtcatttccattaccacacgtagcatcaataacaatgctatcatcttgaatatgttgattaataagtgttttagcaaaaggaagaatacgttctaatttcatgaattcaccttagtattagatgtgtaaaacttaccgtgataagattcacgacgtgctaattcatcatctatttcattgagaacttcccacttgttaacactccacattggtcctaccattaaatcaatcggtccatctccagtaatacgatgaataatcatgtctggcggaaggatttcaagttgatcacacactaagtttgtataatcttcttgagtcataaattcaagcatacctttttcgtattgtttgaccattggtgtacctttaagtaaatgtaataaatggattttaataccttgcacatccatttgtgccacttctcgtgctgtttccatcatcatatgataatcttcacctggtaagccattaataatgtgtgtacatacgttaatattatgtttacgcaatttagctacaccttcgtaatacgtttgcatatcgtgcgcacgattaattaaatcagaggttttctgatgaactgtttgaagaccaagttccacccataaataagtacgttgatttagttcagctaaatattcaaccacatcatctggcagacaatctggacgtgtagcgatagataaaccaataactccttcttcttttaacacaggttcatatttttcttttaaaacttctacaggtgcatgggtatttgtaaatgcttggaagtaagcaatatatttaccttcactccatttttcatgcattcgttctttaatttgttggaattgtacttcaattggatcggctctatttcctgcaaagtcaccactaccagctgctgaacaaaacgtacaaccgccatgtgcgacagtaccgtctctatttggacagtcaaatccgccatctagagcaactttaaaaattttctgtccgaatttattttttaaatggtaattccatgtatgatatcgtttattttcaaaggcatacgggaaatacttacccataacacattatcctttctatctaacttagttctaagtaaagattttaacatattttaatgttatagtgtttattatagttcgataaaaatataaagagaggacttaaaaattatgaatatacctagatcagtatggtggctagttataggaatggcattaaatataactggttctagctttttatggcctttaaatacgatttatatgaaagaagaattaggaaaaagcttgacagtttctgggattgttctaatgattaattcttttggaatggtagttggtaacttactaggtggaacgttgttcgataagttaggtggttaccgtacaatcatgataggtactattacttgtttgcttagtacaacattacttaatttctttcatggatggccgtggtatgcagtttggttagtgctacttggttttggtggaggaatgattgttccagcaatctacgcaatggctggtgccgtttggcctaatggtggcagaacaacttttaatgctatctacttagctcaaaacataggtgttgctgctggagctgcaatgggaggtttcgttgctgaatttagctttaattttatcttcttagctaatttaatcatgtacgtattatttggaattgtagcctttacgcaatttaatttagaataccatgctaaagtgaaatcaccagatagtctagatatccaaagtaaagaaaataaaaaacgttttatagctttaatattattatgtgccatgtttagtatttgttggattggatacattcaatgggaaacaacaatagcctcatttacgcaacaaattaatatttcaatgtctcaatatagtgtattgtggacggtaaatggaattatgattttagttgcacaaccattaattagaccagtcattcgtttgttaaaaggaaacttaaaatatcaaatgtttgttggtattttaatttttatgttgtcattctttgttacaagttttgcagaacaatttaccgtcttcttaataggaatgattattcttacttttggtgaaatgtttgtatggcctgcagtaccaacgattgccaattatttagcgccacaaggtaagcaaggtcaatatcagggtgtagtaaattctgcatcaactgtgggaaaagcatttggtcctctaatcgggggtatattggtagatacattcaatatgagtgcaatgttcataggaatgatcattcttttattaataggaatgtttttcttatctatttttgataagggtctatcgaaacaatcacaacatgaaaatcgttgaaagacaacttgaaaattaaacatataaaatatgatgaaccacttgcaattaggttacgaatctcataatattaaactgtattggagtagtaacttaaatacttttctaaagagagctagtggtggtgcaaactagcgttaagaattaagtgaacttaccgttaattaattgaatttaaaacatctcttactattataaagtgcacatgtaaaatgtgaatgagggtggtaccgcggctaaagaaagtcgtccctgtcaaaagtaatagtttgaggtgttttatttttattaggaggaaaatactttgggttataatcacaaagagattgaaaagaaatggcaaaattattgggctgagaataaaacattcaaagcaaacgataatttaggtcaaaaaaaattctatgcattagatatgtttccatatccatctggtgcgggattacacgtaggacatccagaaggatatactgcaacggatattatttctcgttataaacgtatgcaaggatataatgtattacatccaatgggttgggatgcctttggattacccgctgagcagtacgcgttagatacagggaatgatcctagagaatttactaaaaagaatgttcaaacatttaaacgtcaaattcaagaactaggttttagttatgattgggatcgagaagttaatactacagatcctgaatattataaatggacgcaatggatttttattcagctttataataaaggactcgcatatgtagatgaagttgcagtaaattggtgtccggcacttggtacagtgttatcaaatgaagaggttgtagatggtgtatcagaacgtggaggtcatcctgtatatagacgtccgatgaaacaatgggtattaaaaattacagaatatgccgatcgtttattagaagatttagatgaattagattggcctgaatcaattaaagatatgcaaagaaactggattggtcgttctgaaggtgcacgtgtgtcatttaatgttgaaaatactaatgacactattgatgtgtttacaacacgtccagatactatctacggtacaacattcttagtacttagtcctgaacatgcgttagtgaatgaaattactactgatgagaaaaaagaaatggttaaacagtatcaagaagaagcatcaaaaaaatcagacttagagcgtactgatttagcaaaagataaatcaggtgtgtttactggggcgtatgctattaacccgttatcaggtaagaaacttccaatttggattgctgattatgtattatcgacttatggtacaggtgcagttatggcagtaccaggacatgatgagcgagaccatgaatttgctaagaaatttgatttacctatcattgaagttatcgagggcggaaacgttcaagaagaagcatatactggagaaggtgcacatatcaattctggcgaactagatgggctagataataaagaagcaatttctaaagcaattactttactcgaagccaaaggtgctggcgagaaaaaagtgaattacaaattacgtgactggttatttagtagacaacgttattggggagaaccaattccagtgattcattgggaagatggtacgatgacaactgtgcctgaagaagaacttccattattacttcctgaaactgaccaaatcaaaccatctggtacgggtgaatcaccattagccaatattgatgactttgtaaatgttgttgatgaaaaaacaggcatgaaaggacgtcgcgaaacaaatactatgccacaatgggctggtagttgttggtattatttacgatatattgatccacataatgagaatatgttagcagatccagagaaattaaaacattggttgccggtagacttatatattggtggagtagaacatgcggtacttcacttactgtattcaagattctggcataaagtattatatgatttaggtgtagttcctacgaaagaaccattccaaaaattattcaaccaaggtatgattctcggtgaaggcaacgaaaaaatgagtaaatctaaaggtaatgttgttaatcctgatgatatcgtagcatcccatggcgcagatacattacgcctatatgaaatgtttatgggaccattagatgcagctatagcatggagtgaaaatgggttagatggctctagacgtttcttagatcgtgtatggagattattcattaatgaagatgggtcattatctaataaaattgttgaaaataacgataattcattagataaagtttataatcaaacagttaaaaaagtgacagaagactttgatactcttaactttaatacagcaattagtcaattaatggtatttatcaatgattgttataaagcgaataacatttacaaaccttatgtagaaggatttgttaaaatgttagcaccaattgcccctcacgttagtgaagagttatggcaacgtttaggcaataaagaaactattacgtaccaaccttggcctacgtataatgcatcattacttgtagatgatgagattgaaattgtagtgcaagttaatggtaaagtaagagcgaaaatcaatattcctaaagacttatctaaagaagatatgcaagagttagcattacaaaatgaaaatgttaaactatctatagaaggtaaagagattaaaaaagttattgctgtacctcaaaaattagtgaatatcgttgcaaaataataaaagaggagttttataatggaatcaattacagtagatcaattaaaagagaaaatactaggatctaatccagtaaatattatcgatgtgcgaacagatgaagaaactgcaatgggtacaattcctggtgctaaaactattccaatggatcaaattgctgataacttaaatcaatttaataaaaatgaaacgtactacatcgtttgtgctgcaggtgttcgtagtgaaaaagtagcgaactaccttgaaaatgaaggtattcatgcagttaatgttgaaggtggcatgcaagcatggggtgatgaaggtattgaaatagacagtatataatgatttatagatatttaaacaataatacagaaaaacagcgaagttatgattcttcgctgtttttttataatttaacttatttttaatatttttatattatttagttgtagtacttttaattttattatgatattatacttaagtgtgaatataatattatgtaagtgatagtaacaactatagcatacataaaacattttcattataacaattgacatcaagagagaacatcaaggaggaaacataatgaatctttttaaaaaacagaaatttagtattcgtaaatttagtgtggggacattttcaacgctaattgctacattagtgtttttatcacatcctggtcatgcagcaactcatgatgcagaaacaaatacaagtgctccacaaacgaatgaaagtgcgacgattaataaacaaaatactaatattgaacaaccacataatgaaacaacgtcagcaaatacatctaattcaaatgaaaataatcgaaataatgaaagtaatacttcaagtgattattcaattaaccgtgaacgtgaagaaggtacagtgaataatgtaattaatagcactgaaaataatacaaatcataatgagaaagtaacaactaatgacgtagttagtaatgaaaataatcatgaaactacaaacgttaatcaaccacatagaagagggaaacgttcagtagataacactcctagtactacaaatacagatccgatggctgtaaatgaacaaaatactggtcaaatcattaatgggacatttacagataattcacagggtgcgacgataccgactaagaatttagagtctgcaatgaatgaagcaaatactgtaccgggttggcatgtaaatagtaatgatcaaaccatcattccattaatttggggtcctaaatcgttgcccgcatacaatccttatatattcgataaaaccaataataaaattggtgtagtactatcaaaatataatggtaactttaatcaagttccaggtatagctgatcctacagtaggatcaatttaccaagatgttgatgttactcctggatcagaaatccaattacattatatttctagtagtatgaataatatatggggggttaatggtgcaagagtgtatatttacgatgcgaataatccttctacacttttatataaaggaactccggatatattacagaacccaattggtaactttgtaggtgtatttcaagtgccagaaacagtctcacgattaagattaagatttgaatcggcattaaatcgtagtactgattctactaatggacatagactccttactggtcctaataactttggaggcggagtgttagctgatgttaccattaatagtggcgcatatttaactgcgacagtaaataatacacactactttgcacaatctggatccataaatgctgatcgagtttatcaagaaatagggtttagaattgaaaatagaggacattctagttcaaataaaacagaatatacgattgttttaccagaagatgtgacatatgtatctacaaaaaatgctactggaaaatttaatgcagcaactaaagagttaacagttaaaatagatcgacttgaagcaggagcaagtaaaaatatttctataggattatccttaccaactgatcgaccaattgaaaaagaattcttaggacatttgacttatgttacagatggtataaatatgaataggttaagtgattctaaagattttggacgtaataatggtgatcactatacaagatacggtgtgcataatgaatttgtaagtgttgattctgctatgcgacaaggagatattgtattagataaacaaaccattacagttaaaatgtataagcaacatttgagagacaaagtaacagaaattgaggatgatttagccaatcttgatcaaaacgataattcacctgaagtatgggaagcaatgcaagtgatacttagaaaagctaaagaagtattagctgaaacagatgagatgcctataagtgaattgaaagatcaagcaacgattaatagtatcgatttaaatttagataaagcacatgctaaattatcattagacaaagttgcaagaactaaaagagcgctctttatgggtaacgatacagctacaattgaagaaaaaaatgctgtgattgagcaagtgaatcaagcactacaatctagttatacaactgttgatcaatcaatgacttcaaatgatgtagcaacaaataaagacactggaattaatgaaattacaatgattgatcttactccaacagtaaagcaagcagcaattgatgaattaactgaaagagcaaatgctaaaaaagtagagtttgataataatcctgatgcaacagtagaagaaaaagaagctgcaaaagcaacgattgataatttagtgtcagaggctacaacaaatattatgaatgaaactacaaataatggtgtagcgcaacaaaaaacaagtagcatagatagtgtgaatgctgctactataactccaactgttcgaagtaacgctagaacagcaatagataatatagcatctgcaagaaaagttgaaatagataaggataataatgcaactttagaagaaaaaaatgcagccaaaactgaaatagacaatttagtagctagagcaaaagcagatattaacagtctaaatcacaataatgaaattgaaatattaaaagaaaacaaagtaaacgagatatcacaagtagtagcgcatccagtaaagaaaaatgctgctacacaagcaattgatcaagccgctatagctaaaaaacaagcaattgatttaatagaagatgcgactatagaagaaaaagaagtcgcaaaggcaaaagtagataaaatagtaatcgaagctaaaaataacattaatcaagcaactactaattcaagtgtagatgatgcacaaaatgaaggaataactgcaattaatgcagttactccagaagtggttaaaaaatcagatgcaagagatacaatcgatgaggtagcccgaattaaaaaagcagcaattgatcaaacacctgatgcaacagtagaagaaaaagaggcagcaatagcgaaaatagatcaagaggttactaaggctaaggaacaaattcatcaagcactaaaaaatgaaaatgtagatactgctaaaacaaatggtacgaattttattaatgcaatccaaccagaaattacgaaaaaaatgaaagcaagagagacaattgatgaagtagctagagctaagaaagaagcaattgatcgaacactagatgcgacaacagaagaaaaagaagctgcaaaagcgaaagtagtccaagcggtaacggaagccaaagctcatatcaatgaagcaataaataattcaggtgtggatgaagcaaaaacaaatggtacaactacaatcaatgcaatccaaccagaagtaatcaaaaaatcagaaaccgtaatcttttgtaacgtcgtctgttgttggttcataagcatcgttatctgcttgttcatttgttgttactggtactgttacatgatcttctgtgccatctggatatgtcactgttactggaacgtcgtctgttcctggcgtattaccgtttggtaatgtacttggatcatctactgtgattgttggtgttcctttttctgatggataatctggaattgttactgctcctgttacatcatcctcagttgttgggtcaccgtaatcttttgtaacgccgtctgttgttggttcataagcagctttatctgtagcaactacaaatgaatctgatccaacgtctttaccacctgtaactaaaaatacagtgtatacatcgccactttgcgctgaggctggaacagtaaattgacccttttgctctccatcagtaaatgaagtaatatcatctgttttagaaacaacatttccgtttttatctctccactcgatatgagtaggaagtggtgataattgagtaccacttaaatcaatttgagctacatcacctggtctagccggtttagtagtattgttgtaattagttatgtcaattttaacatcgttttgaggtactaatgcaaagtttaaattgtaccacatagggttaactatcaagttttgtcctggtctagattgaggaacaaatgatgagttagccattggagatctaaattgtggtgatgtgaatgaagagtatgcgttttgaacttctccatttggattaaccacataaccatacatatattcatcatttagagttccatctggaaaacgcaacgtatatctaccatttgagtcagtttcaccatatactgttgcagaaatatattcaggatggtcacttaatagaactttagctgcatcagctctttcagattcaggtaaactatctacagcagctttatatgcttgaacaccttcgctagtaagtgatgacataactactgtatagcctggagcaactttatcattcccagataagtttggaccagttgcagagtttgctaaatcaacaccagtaccagtttctaaccaaacttgtccagaaactgtatttttggcttttgtatttacagctgcgttactaatcggtccttgagtatcatgaatccattgatctttacttgtagtcatgtaatcagatgaaggtttaacgcccatgtaaataccagtacgttgcatgtttgtaccgattaatggaaattgaccaatattattacttgttactgaatttacataagaaccagggaagaatccacctgcttgacgtaacatcgttacagtattaccattcttagtttgataatcctcaatccataatttataatattgaccgctagtcgctgaatatttatgttctttaccgtttgcatcagtataggcttgtcttaagtcaaacgcataagcaccaggtcctacttgtgaaccatttgacgttgataaagaattgttagtatgcgctctatagattggagatactacaccatcagtatcaatccattgcatgtaaacagctgtaccgtcgggaacaggagttaaaccatttgatatagttgcaggtgtaccttgatcaactacccaagcacgtcctgataaagtattagctgcattagtagcatctgtttgtgatttaatataaccattcttaatcgcgtctgcttcgataattcgattgttatcagtattagatacattatcattggttggcgtatcagcagcaagtgccctagcagcaaataatcttggtcttagtgtatttgttgtttcttcattacgtgcagttgctgaatttatgtttaatggtgtaacaactggtgtttcgttgctattattggcataatcattttgaataagtgcagcaatagcttctacttctgttgcattagatgtatctactccagcattttctagagcttgaactgtatcattacttgatacatttaactcttcagagatggtttgaattgaagcactagcttcaggttgttcaacaacatcactagttatttcatatttgtctaatgatgattggtttgtttctgtactgtcatttgcttctttttcttctggtgatgattcatctgtttgagtactttcagccgctttttcttctgctgatgattcatctgtttgagtactttcagccgctttttcttctgctaatgattcatctgtttgagtactttcagccgctttttcttctgctgatgattcatctgtttgagtactttcagccgctttttcttctgctgatgattcatctgttgttatgttttcacttgttgctttttcttctggtgatggttggtctgttgttatgttctcacttgtcgctttttcttctggtgatggttggtctgttgttatgttctcacttgtcactttttcttctgttgatggttgttccgttgtatcagtaggtgaagatgtattattttgatttgttactgtttgatctgattcggcagcttttgcttcttcctgccctgccccaaagattaatgttgcacctactaaaatagatgccgctcctactgtaaattttctaattgagtatttgttttgaacattaggtaagaaatctaatcttcgatttggtttctttttcaaataactcacacccctatttttcaaattaattgagtacaatactccgataaaaatataacattttaatattatattgacaatacatatattttcaaaaaatatcaggaattttagaaaacacacgtcttcattgatactaataattattaaaaaaatattaatactttttttatttaatttaataaaaaaataaaaaaagagcgatacttatcgctctttaaactcgtttcttcctttataaatgtgttttttaacattattataatttattttaaatgttcgtacggactgttatggacaaatgatacgatttgatcaacaaataattttgcgcgtaattggaattcttcgtcatttaaatacagtgtaccgtcttctaattttgcatagtccgaatcgtgtgttgcaatttgtgtaggtacagcaatacctaataaactacgaacaatgacacgtaaatgtgagagtggttctgaacttacgataccgccactgttaccaattaagcccactggtttcattttgacatattccatattaatgtgatctaacgcattttttaaaatgcctgaatatgaaccatgataatttggcgtaccaaaaattaggaaatccgcttccattgctttgtcttggaacgcttttgtattggctttaatttcctctgttgaatgtgttgttcctgaaaaatcaagttgatttaatggtctttcagctaaatcaaaaatatctacgtcgacatcatgattatcgaattgtcctgttaaatatttagctagtgcattggtatgtgaacctacttgtgcacttcctactacgataagtcctttcatttcgttctaacacctcttaaatattatttatttctcttcagttaaaactttcataattgctttacctacaccactatgttcattggtatctgtaaccaatttagctatagctttcacttcgggcatcgcattgtccatcgcaacaggatagcctacgcgttcaagcatggatacatcgtttaaattatcacctaacgccatgacatcttgtaagtcaatatgaagttgattagcaatagtttctaatgcaattcctttttgagcatctgaatgcgtaatttctaaattaccacgtgatgatgatgaaacagcaagacttgatatggccgataattcttttccaatacgttcaattttttcaagatctggattaaacgccagtactttcattatcagttcgcccggaatatcttcaatatccttgtaattatcgacaattttgagtgtcccgttatctatacgtttttgaatccctgctttaatcttttcaacatcaccttgttggcctgcatttcttgcaatatctaaatagatatctaaatcacgtgttggatcttctgtataaatccctctattcgtatacacttggtagtacacgtcttcccgatcaagaatcgctttaattcgttctactaattcatgatttaaatgagaggtattcataatattgaatgattcatcacgtacttctgcaccatttaaacaaatataaggcacttttaaatctgtttcagccatgggcgtgcttgcttcataaaacgcacgacccgttgcaatgactactgtaatcccttttgattgagcatatttaatcgcattaatattttcttctgaaatttcatgtgctgcatttaacagtgtcccatccatatctgttgcaatcagtttaatcatgccgttacctcatttcattagctaaacttacagctattatattttagaacatacatattcagtgaacacaattacaaaatttaaatttgttttgccgttcctattttaacaaatttaccatcttttgtacggtgatgtgtttcttttaacttttttagctcttaaatcacggaaaaattgtctcaataaattgctacacgcttcttctaacacaccctgttcaacaattgcacgatgattaaattgtggttgttgtagtaaatccattaaactaccactgcatcctcctttaggatccatcgcgccatatacaacccgtggtatacgactcattacaaccgttccagcacacatgacacagggttctaatgtgacatataatgtacaatcttctaaacgccaacttcctatgactttagctgcccgttctattgctaagtgttcagcatgagcagtaggttgttgcagggtttctcttaaattatgggctcgtgaaataatttcattatctttaacgatcactgctccgataggaacttcaccaagttgtcgagcttttttcgcttcttcaattgcacatttcatgtaaaattcatcatttgtcatatgtgtcatcccttacttatgataaaatactcaatgtctattttaacatttggagatgtaattatgaataaaccatttattgcaatagaaggtccgattggcgttggcaaatcgtctcttactcataaaattagccaaacctttaattattatgaagaaaatgaaatcattaatgaaaacccctttctttctgatttttatgatgatatttcaaaatggagttttcaaactgaaatgttcttcctttgtaatcgttataaacaagcacaagatattgcaaaaattaatcaaggtgtggtaagtgattaccatatttataaaaatagaatatttgcgcgcaatacacttaacgaatcagaatttgataaattcaatcgtattttcaatattttaactgaagatctcgaattacctaatatgatcatctttttagatgctgatttagatgtactgaaacgtcgcattgctaaacgtaaccgtagctttgaacatcaaattgaagatagctacttacttaatttaaaaaaggattatttatcattttatgaaacattaaaaaacgaaggtgctaatgtgattttaatcgacacttctgatttagattttgtacaaaatgaatcagattatcaattgattttaaaccaaattaaacccatgataggagatataaaatatgaataattacggtatccctcaaaatgcagttattacaattgctggaacggtaggcgtaggaaaatctacattaactcaagcgcttgctgataaactcaatttcagaacttcctttgaaaatgtagaccataacccctacttagataaattctataatgattttgaacgttggagtttccatctgcaaatttattttttagctgaacgttttaaagaacaaaaacgcatgtttgaatacggaggaggctttatacaagatcgttctatttatgaagatgttgatattttcgcaaaaatgcatgaagaacaaggaacaatgagtaaagaagattttaaaacttactcggagttatttgaagcaatggttatgacaccctatttccctaaaccagacgttttaatttatttagattgtgattatgatgaagtaatcgaccgtattcatcaacgtggccgcgatatggaaatgaatactgatccggtatattggaaaaagttatttaaacgctatgaaaattggattaacaattttaatgcttgtcccgtagtaagagtgaacattaatgaatatgatattcatgaaaaccccgactctttagatccaattatcgacaaaattgcacatattattcaaacatatcgaaatgtcgatcatcgataaaaaaagagagacagaatttactgtctcacctaggcaagaaggactagaattaaaaaattggtataaatacatttttaattcagtccttggctgccaatatgttataaatgtagaaaataacaattgatactttaatctctttgtgtttaattattttgtgtatatttttttaatacttctggtacactcacagctgtttcaatcacgtaatcagcatccacaagttcctctttttttgcgataccacttaatacaccaatggctaaacctaactttgcattcactttagtcttcatatcattatttgtgtcacctacaatggctacatcttccggtttaacatcgtaatgatcaaaaagtggcttaagtacttcaggattgggtttttcagccgcatgcgcttcagtagaaatgactaaatcaaacgcatctttagaatgtgtttcttctaaaaattgtgtcactcctttttcagagtcgctagtcacaataccaattttatagccttcttgtcgtaatgattgaatcatatcataaacgccatctatccagttattttctggttcacggctatctactaatgtttgacttgtatcacgcgtccatttagaaacatcttttccagattcatcattaaatgcatgaacaatttcatctaacgatcctgaacccataacagaatctggactaatcgtatctttaacaacgcctagtttgcgaagcgttgcttctttattcgctacaggaaatgtctctaggaaactatttaccaagcgtacgccaattttttcccaactatgatcaaattcgattaatgtaccatctttatcaaataatatccattccatttatatatacactccttattttgtatttcattgtaatatacattgttcttttaagtatagtaaaagaattgcttagcataggtttataaaaaaagccatacctctctaggtatgactcaactaagaatatataaaactagttttgaataacgttggcattaatgcctcaacgggaatgagactatgtgtaagggaatagtccctaaaaatatcatacatcacttcatttttattatctacaacaagttgacaagtatcaacattctatttcattatatatttataatcttacaggtgcgatattaaaaaattctacttttccacagtttttgcattctgtaataaatgttttaatatttgatgtttcagtatcgtcagaaactggagaaaatacaaatttatcttcatgatatttaattttaggtgctatacaacatgtatcacgatgttttttcttatgaaaatcagaaaatttttcaatttcattgtttgaatatttagcttcagtcattatcatcacctcttatttaatgtgtttcaactttatcataaacgatcaaaaaaattgtacacagttccttaattgtttacttttaatacctaaatgttaattcgctataatttaaattatatattaagaaacacgcttcttatttagtaactatatctaaataaaaagcgtgctttactagtatttaatgaaaatatatattcaattcgattagggggaaacaattaattaatttctcggttcaccatttacaagaataccacttactaaatcatatacttttttaatgaaactaaagatatctaacatggttttcatctccttaaatatatttacaactaatagtttagtacatattttaatttataggagatttctgcctaagttgatatgactcatgctaaagtgtcttgatttccctattatttcatattaaatgttgcctagaagtccaaattattcatcaagttcccaaaaaaatgaaaaagatgtattgaaaaataataaaaagtttgccttattgcttttatatctataagtggtttaattaatagataatacagtgattacaatcttcacttaaaaaatgaatgaactgattcatcaaattccataacatatctttgtgatatgctattgagtaattttaacaatgatattcatcatatcattactaaaaatgaaaggatatattcatgttaatcgttatttttattttattcggaatcggaattggattatttatattaagtttcttcttagcacaaaatgaaggactcgcttataaaacaattagcagagggttttctgcactatttgtatcacttggtatattagcattaatggggtatctcattaattttatttcttcacattatttaaatatctaattccttatattttctattctcaacaaagtggaaagacatcatttaaagttgtctttccactttttcaatttactttattttattattggtctcttgatgatacttgaatcaaatatatatcgtattaattactctaagatgatccaaatcacggataaaaattggattaaggtaatcaaatagagcaacatcatagttagcattactttcattgaaacttagtcttactagtcgtgtacgagtgaggctttttttcgcataaaaaaaggggctttatgcccctaaagatctatatcatttaaatgaatttcaaatgttgagattacctaagtaataatggtattaggtatatggtatttgtaatagaagaaaaacactaagtcaagggttgtcatttaggtaatctcattacttattattacataataaaatttaattatctatactattgaaataaaaaaataatattttttacatttaaatctaattaattattaaaatgataaaaaaatgtttatctttatttgtaaagggtataatttaattatcagaatatttcgttataatattttgctctttatttattttacatcaccactcttacttagttcgacataagctatgttaagagtggtttttttatgcaaaaaagaagccaactcactttttgatatacccccaaaagttgttctaaaataaaaaacaacaagctagaaaccgcgtagttataacgtttctagcttgttttcacaagttatttatattctggcacaataactctccagccatgtttatcttctaatttaccactttggataccagtgtatgtgtcatataattttttagtgatttctccaggttcgttattattaatcacaatttctctatcttcatattttaacgtacctactggagagatgactgctgccgtaccagaaccaaatacttctgttaattcacctttatcgtaagcttcaaataattcatcaatagatactttacgttcttcgacttcatagcctaattcttttgctaattcgataattgatttacgtgtaataccaggtaaaatactaccatttaatgcaggtgttactaatttgccattttcaacgaagaaaatgttcatactacctacttcttcaacatatttttgttcaacgccatccaaccataatacttgatcatatcctaagttattcgcattggtttgtgctaataaacttgcagcatagttacctgctactttagcaaatcctacccccccacgaactgcacgtacatattcatcttcaacataaatttttgttgattttaatgtatcaccgccgtagtaagcgcctgatggagataagataattaataatttgtattttttagaagcacgaacacctaagatgccttctgtagcgaatacgaatggacgaatatataaagattgaccctcgccttctggcacccaatcacgttcgatatcaacaagttgtttcaaaccttctaataataattcttcatctactttaggcatctctaaacgcgctaatgaatcattgatacgtttgaagttttgatctggacggaataatacgacctcaccattatgtttatatgcttttaaaccttcaaatacagcttgaccatagtgtaaactttgtgctgctggagaaatttcaaacggtgcataaggaacaatttttaattcttgccaaccgcctttttcttcatcataatctacacttaacatatagtcagtgaaatattgcccaaacccaagatttccttctggtttttctttaagtgtgtcacgttgttcaaatttaactttttctgacatgttgaagcctcctaatatatttcatgaataagatttaatataaattatagcaatctcatatagtctattcaataaattttctaaaaattcaaataaaataaaaaatgaaacccttttcttttttatactctttaaaagagagtcaaattccaaaccacctttttaattatgaacttatgtcttttcttcattttctttaatcgttcgtatcattgtttctgtcattttagccaaatgatactttggattaaagccccattcttttcgagaataactggtatcaatattatctggccacgtatctgcaatcgcttgtcttactggatcgacattataatctaatgtaaattcaggaatatgtttttgaatttctttcttaatcatctcaggttcaaaactcattgcgcttaaattataaccattgcgtattacaagtgtcttactatccgcttccataagttgaataatcgcatcaatggcatcgtccatatacatcatatccatatacgtatgtttagcgatataactcgtgtaatgaccatgtctaaccgcttcgaaatatatttctactgcgtaatctgtagtacctccgcctggctctttggtatgtgaaatgagccctggaaatcttacactacgtgtgtcgacaccaaactttttaaagtaatattggcataataattcacctgtaactttatttatcccgtacattgtggtcggttgttgaatcgtattttgaggtgtgtttttcttaggtgtagacgcaccaaatgccccaattgaacttggcataaagaaatgtaagtcatacattcttgcagtttctaaagcattcattaacccacccatatttaaatcccaagcctgcaaaggatttttttcagctgttgcagaaagtaacgcagccatatgcataagtgtatctgctctaaagtcttctactacagccatcattgcgtcacgatctgttacatcaagtaattcaaatggaccatcattaatcaatgaatgtggttctagctctttaatatcagtggctaatacattatttttcccatataattgtctacattttagtaccaattcagttcctatttgtcctagtgctcctgtaattacaattctcttcattattatttctccctttatcttatctatcctagtagcgactttttagaactccccatattcttagatccactatattataaaactatttacatatatcattagattgtacgttaaagtaataattttattcttctaataaattacttatttgatttaatttacgttttgtttgttaattatttttaaaattatcttaaattatttttttccttcttatatttcagcgcctatatgctactataaacttgtaaattatttttaaaaggaggctaacatgaagaaatattttgtatcactcttattgattttctttattgcttttggattattatctttaacatcatatgcagcagaagttcccgataccgcttcaactttacaaaatgatgcgatatcttcccaatctaaagcaatgacatcttcaccacaagagaaaacatctcaaaatcatcaaactactttttcagaaaaaacaacttctgaaaaagcgactacggaaaatgtctcaactattaaaacctctcaagataatgtatcaacacaaaataagactcaaatagttgagcaacatatttcttcaccacagacgaactcaacatcatcgacaactgtaacatctcaaacgtcatctgaagtacctactcaagaaaaagcatcacaaacaactcaaacatcatcggcacaacttcaaacttcaaaagaaaatattactgcaccaaaagcaatgtctcaaaagacatcatcaacctcttctgttcaaacatctcgcccatcaactaatgtatcaacccaaaaggctacactaacacaaacatcaaaatctcaagatacgacaacattaaatcataagaacattacaactcaaactacttcaaatactaaagcaactacaccatcatctacaacacacgctattttacatacaaatgatattcatggtcgctttgtagaagaagacggaagagtgattggcatggctaaagtaaaaggtcttaaagatcaaattcaacctgatttagtattagatgcgggagacgctttccaaggactgcctgtttcaaataaatcaaaaggtgaagaaatggcaaaagcgatgaatagtgtaggttacgatgctatgacaatcggtaaccatgaatttgattttggttatgatcagttaatgaaattgcaacaacagcttaatttcccaatgttatcatctaatatttataaagatggccaccttatatttaaaccatctacaatcataactaaaaataatatacgttatggggttgtaggtgtgacaacacctgaaactaaaacaaaaacctctccaacagcagttaatgatattgaatttaaagatccacttcccagtgtgacacaagcaatgaatgatattaaagataatgtagacgtttttgttattttatctcacttaggtgtcgataaatctacaagaaatatatggcgtagtaattatttaattgatcaattaacacaatcaaaactattttcacaccccattttcgtcgtagatggacattcacataccgtaatcgaacatggtagagactacggcgcaaataatgtacttactcaaacaggtacagcacttgcaaatgttggacgtattgatttcgatgtacataatggaactattaataatgtaaatgcctcactgattaatgtggcagatactaaagaagttccaactgactctcaaattgaagctcaaacacgtcaagcaaataacgaatttttaaaagaaacctcaactgtgattattccaaataatccagtgacgttaaatggcgaacgtgaacacgtacgtacacaagaaactaatttagggaatcttattacagatgctatggaggcttatgctgaaaataatttctcacatcgacctgactttgcagtcacaaatggtggtggtattagagcttctattcaaacaggccaagtaacagaaaatgatgttataacagtattaccttttggaaatttaatttctcaaattgaagttaaaggttctgacgttaaacaagcatttgaacatagtttaagttctactaccgatattcaagatgggaaaaaagttttagccccaagtggtggctttttacaagtatcaaattcaattcgcgtatactttaatcttgataaagaatctggccaacgtgtcagtgccattaaaatcttaaacaaatcaactggtaagtatgaaaatttagattctaatcgtacatattatgtaacgacaaatgattttacagctcatcaaggtgatggttatgatatgttcggtggaaaacgtgaggaaggaatctctttagatgctgttgtttcccaatatataaaagaagctgatctaagtagttatgatacagtggatgctgtacgaatcatcaatggtcaacctgaaatcgatgaacaaactgatgatgcgactactacacaaccgcatgatcaaacgacatcatctcaatcaaatacacacctagaaggagcacaaccaaaacatccaggtaaagtctctcaacctaataaaaaagataatgatcacaaagtagttgccattcatgaaagtcctcatccttgtatcaaccatcataaatcaatagcaccaaaacatcattcaaatgatatggcaaatacaaaccataaacatcttacttcaacgcatactcaacaatgtcatactcatgctatagcaattgataaacacaaaaattatactggtacgcatgcacacatcaatcactatgatgttgctcatcaccctatcaaaacaatgctatctttagaaaataagttaactcaagaatcacaatatcataacattgcacatttgattggaccttatcaatatcaatctaatcaagaacttacatcatctaaagcatgtcatacgaataaaggatcaagagcgtatacattacctctaaagcatggtacggattcaaatactcatcatgattctatacacgtagtgacaataaatgactcagaagcaacatcagaattaactggatgttatacaaataagcatcatgtacaacttccaagcacaggtaaaaaagaggctaatttagagcacggtattgcgattttattagtaacaacaggtgctggattgatatatcttcgtcaacgtaaaaaatcagcataatatttaaataaaaataccgtatcagccatgtctacgttatcactgatacggtatctatgttttatacagtatagggttaattagtttgttgagcttttttataaaagtattgtgccactactatatctacaatagctaaacctactgatttaaatactgtcacttcttcttcatcatcacgtccagatatttttccacttacgatatctcctagttcaccatgtaatgatcgctcagtaaggatgccttcttctaatggtacttttaaatcacctgtttcttccattgctgcttctgtagattcaacaactattttattagcaatcaacatcgtttctgaaggtagttcttgcatttcaggtttaaatgaacctactgcatttaaatgaacaccgggatgtaatgaatgagaatacaccggtttatttgaatttgtagctgtcacaacaatatctgcgttttccatggcttgatctgcttcatcgaagacttttgttgacacgtgatacgtttgtttcacaaattcagccaatgtttcagctttatctcttgtacgactcgagatatgaagcatttcaatatctctcactgctaatattgctgcaatgagcccctcagcttgatctccagcgccaatcacacacaatgtttttgcattttcacgcgctaaatattttgtagctacaccagaaatggcgcctgtacgaatcttagttaaataactaccatcaagtacagcaagggtttctcctgtatcataatcgctcagcaagactgatccagtaattgtttttttatctagtttagaattattaggtgcgaaagtgactgttttaataccgacaatatttaattcatctgataaagctggcatcactaaatatctattttctttattaaaaggtaacacataacgtaatggcgtttcagtttttccttctgaaaacacctgtaacgcatgaccgacttcttcaatcacttctttcatatctaataagttttgttgatcttgttcatttaaaacgatcatttcatagacctccactatttggatattgttaaatgatagattagaagtaacaatcattcaatttaatcattatatattctaatccactgaatattaatattttttatagattttattaacttattattgtgatgatataaaattgatgatgtctttatattataaataaaaggtacagtttatataataaagtgccttgcgatttcataacaatatgaaactattcataaacttttgacacccatcacttttcttatgagaaaagtgatttttttatatcttcctataaatgattgctataatacctttgtttcaatctataacaccttcattataataggtagctttattatttaaaaatacttttaaactgtgattatagtatgtaagattttgatctgcttcttcgatggtcatccattttgtttctgaaatttcatctttcatttgtatatctatgacttcatttttaattgtagctttaaacataataaataatgtgtgtacattcatttgagttgatttaccttcattaatacttacgatatctccaatcttagcattaagacctgtttcttccattacttcacgtttcatagcttcaattagcgtttcttccttttctacctttcctcctggtaatgaccaccccccgccatctgtattattaacaagtaatacttttctttcttgattttgtatgagcgcatatacgacttttaaatctttcacagtttcaccttccatcatttggaatttcaaatcgacttactggctggccgttttttttaatgtacgaattaatttcatatcctccatgtttttttattactttttgtgaagcataattataaggattacatgtcatcaatactttatgtatccccattttatttagtctatttagtgcttcttctaacatgcttgaagcataaccatttcctctgtatggtttggcgacgccataacctacatgtcctccaatgttttttaatttatcattaagttcatgacgaatatttactgcaccaacaatatcatcatttttaaaataaaataatgttgtagaaggaacggtattcatatttacgggtggatgattcaattgttcgaccatttgttgaaaagattgataatgtgcgacatcgacattagatggaacaattttctcattgttgtcataccaatattgtaaatatcgaattaaactttctttatctttatactctagttttcttaattcaagcatgtatacacctctttttttacaattagtgtaccactaaaaatgaaaaacaatccatttatacatttaaactaatagatgactcaaattaattaaatgtttatttaatactatttaaccttttccaactttttaatactttaagtgcttgatctaacattttttagtgcgtgcgacataatcacctacgacatcgatagctttagataatgtaccgatttggaaatcaattttgtcttgtaagtctaaatgttttactattcctgcacctttatctatcacaaaaccatgtgtctcatcatttctcttttattattgattcatcatcattttatattataagataattcattcatttaatacctggtagtgtatcttttattaaaattataatgagtgactactgagtttaagtagaatttgttatactaaagttcataataattaggaagaagtggtcaatgtgtttgattggtttcaattagccagtgaaaaagaaaatagaatgattcaaatgcgtcgttatatgcatcaatatccagagccttcatttgaagaaacgtggacacataactacattctcaatcagttaagtcatttagactgtgagattgtgtcacctgtaggacgaaatggtatcaaagcaacttttaaaggaaaagaaaatggcccaactattgcatttcgtgcagacttcgatgcattaccagtccaagaattaaacgaagttccatataaatctaaaaacgatggttttatgcatgcatgtggacacgatggtcatactgctattttattaggtgttgctgaaattgttcacgaacatcgtcacttattaaaaggaaatgttgtatttatttttcaatatggtgaagagattatgccaggtggctctcaagaaatgattgatgatggctgtttaaacgatgttgataaaatttatggtactcatctttggagtggttatcctactggtacaatttattcaagaccaggtgcaatcatggcttctccagatgaattctcgattaccattaaaggtaaaggaggtcatggcgctaaacctcatgaaacaattgatccaattgtaattatggctgagtttatactaagtgctcaaaaaatcatttctcgtaccattgatcctgtaaaagaagcagtattaacctttggtatggtacaagcaggttcttctgatagtgttattccagattcagcattttgtaaagggaccgtacgtacctttgatacaaaactacaagctcatgttcaagagaaaatggataagttattacaaggtcttgcattagcgaatgatatcacttatgacatggagtatattagagggtatttaccagttcataatcatgaagcagcttatgaaacagttaaacaagcggcaaatgatttacatttacgttttaataaatcagaactgatgatgattggtgaagacttttcacactatctaaaagtccgacctggtgcatttttcttaactggatgtggcaatgctgataaaggtattacagccccacatcacaatcctcattttgatattgatgaagcagcatttaaatatgctgcaagtgaatttcttaaaatcttagaacttgaaagcgttttttaattcattgttaaatatgtatcgtaaatcttagaaaataaacgattgaaacagctcatagatagtatttatctatgggctgttttattaatattttttactaaattaaagcaaagtgaacttacgtcttattttcaaataaaaaaagacccccactaagggagtcttccatatcaaataataaattattcgaagatttcagttacaacgcctgatcctacagtacgtccaccttcacggattgagaaacgagtaccgtcttcaatcgcgataggagcgattaattctactgtcatttcaacgttgtcgccaggcattaccatttcagtaccttctggtaagttaacaacaccagttacgtcagtagtacggaaatagaattgtggacgatagttagagaagaatggagtatgacgtccaccttcatcttttgataaaacgtatacgtctgctttgaattttgtgtgaggtgtaattgaacctggagcagctaatacttgaccacgttgtacatcttcacgagcaacaccacgtaataaagcaccgatgttgtcaccagcttcagcgtagtctaataatttacggaacatttctacaccagtaacagttgttttagaagtttctttgataccaataatttcaacttcttcaccaactttgatttgaccacgttcaacacggcctgtagcaacagtaccacgaccagtgattgagaatacgtcctcaactggcatcatgaatggtttatcagagtcacgttctggagttggaatataatcatcaactgcttgcattaattctaagattttttcttcgtattgagcatcgccttctaaagcttttaaagctgaaccagcgattacaggtacgtcgtcacctgggaagtcgtattcagataataagtcacgtacttccatttcaactaattctaataattcttcatcgtcaaccatgtcaactttgtttaagaatactactaatgctggtacaccaacgttacgtgataaaagaatgtgttcacgagtttgtggcattggaccatcagcagcagatactactaagatagcgccgtccatttgagcagcaccagtgatcatgtttttaacatagtcagcgtgtcctgggcagtcaacgtgagcatagtgacgtttgtcagtttgatattcgatgtgtgcagtattgattgtaataccacgttctttttcttctggagcgttgtcaatcatgtcatatgattgtgctacagtgtcaccatttttagctaatacagttgcgatagcagctgttaaagtagttttaccatggtcaacgtgaccgatagtaccaatattggcatgttcttttgagcgatcaaatttttcttttgccattattaaatctctcctattctagttaagttatttcaatattatctctcatgatagttactcactatcatgagacataatgattgttctaaaaagaattcatagttcttttataatgcattttggataaaaaatcaattcataaagatgaatgcttaattaataagctcaagctgtattttacctagatttactagttaaaacaagttatattattcacctttattttttttgatgatttcttcagcaattgattttggaacttctgcataatggtcaaagtacatagtgtaagtaccgcgaccttgagtgttagaacgtaatgaagttgcataaccaaacatttctgaaagtggtacataagcgttaacaacttgtgcattaccacgtggttccataccatcaacacgtccacgacgagctgttacgtcacccatgatatcgcccatgtattcttcaggcatttcgattgtaactttcatcattggttctaagataactggatcacattttttagcagcttctttaagtgctaatgatgcagcaattttgaaggccatttctgatgaatcgacatcatggtatgaaccatcaaataatttagctttaacatcaattaatggataaccagctaatacaccattttccatggcatctttaagaccagcttcaactgatggaatgtattcacgaggaactacaccaccaacgatagcgttttcgaattcgaatcctgcgccagtttcatttggagtgaattcaatatgaacatcaccatattgtccacgaccacctgattgacgagagaatttaccttgaacttgagcagattgtttaaatgtttcacgataagaaaccattggtgcacctacgttacattcaacgttgaattcttttttcatacggtctactaggatatctaagtgtaactcacccataccaccgatgataacttgtccagtttcttcgtcagtatgtgcatggaaagtagggtcttcttcttgtaatttaactaaagcttgagtcattttatcttggtcagctttagatttaggttctactgataagtgaataactggttctgggaattccattgattccaagataatgtcatttttctcaccacataaagtgtcaccagtacctgtttctttaagacctacagctgcagcgatatctcctgagtaaacagtgtcaatttcttgacgagagttcgcatgcatttgtaataaacgacctacacgttcacgtttgttttttgttgagtttttaacgtatgaaccagatgttaacgtacctgaatatacacggaagaaagttaatttaccaacataagggtcagtcataactttgaaagctaatgctgcgaattcgccattatcgtcagcttttgcaatgacttcttcatcaggattttcagcacgatgacctacgataggtttaacatctaatggtgatggtaaataatcaattactgcattaagcattaattgaacacctttgtttttgaatgctgtaccacaaagtactgggtagaattctacgtcagtagtagcttgacggatagcattttttaattcagctactgaaatttcttcgtcaccaagatatttttccattaattcgtcgctagtttctgcaactgcttcgattaaattagaacgagcttcttctgctctttctttgtgatcttcaggaatttcaatttcatcaatttctgtacctaagtcatttgtatatttgaaacatttcatttcaactaagtcgatgattgcttcaaattcatcttcggcaccaattggtaattggataggtgctgcatttgcttgtaagcgatcatgtaatgtgcttactgaatactcaaagtttgcaccaagtttatccattttgttaacgaatacaatacgaggaacaccataagtagtagcttgacgccaaacagtttcagtttgaggttctacacctgattgagcatcaagtacagtaaccgcaccatcaagtacacgtaatgaacgttcaacttctacagtgaagtctacgtgccctggtgtatcgataatgttaacgcggtggtctttccaagaagctgttgttgcagctgatgtgattgtaataccacgatcttgttcttgttccatccagtccatttgtgaagcaccttcatgtgtttcaccaattttgtggatacgacctgtataataaagaatacgttcagtcgttgtagttttaccagcatcgatgtgagccatgataccgatattacgagtgtttttcaaagaaaagtctctagccattgtttttctccttccagttattactgaataagtactatagaatatggcgatgccctaagcatgaaccattttacttggtaaaccaatatgacggaacacactcagggttaaagctttaatcttaccaacgatagtgagcgaatgctttgttcgcttcagccattttgtgagtgtcctcacgttttttgactgcaccacctgtattattagcagcatctaagatttcgttagctaaacgatcttccatagttttttcaccacgaagacgagcgtagtttactaaccaacgtaatcctaaagtcgtacgacgttctgggcgcacctcaacaggtacttggtagtttgaaccacctacacgacgcgcttttacttctaatactggcataatgttgttaatagcttcttcgaatacttctaaagcatcacgaccactgcgttgttctacaaggtcaaatgcagaataaagaattctttgtgctgttccgcgtttaccgtctaacataattttgttaattaattttgtaactaacttagagttatgaattggatctggtaatacgtctcttttaggtactgatcctttacgaggcattataaagtcctcccttcctattataatatattcttaaaaattgatagtaaaatttacacaatcttaaacttaatttttaggttttttagttccgtataatgaacgtccttgtctacgtccatctacacctgaagtatcaagcgcaccacgtacaatatggtaacgcacaccaggtaagtcttttacacgtccaccacgtacaagtacaacactgtgttcttgtaagttatggccgataccaggaatgtatgcgttgatttcaatgttatttgataaacgcacacgagcatatttacgtaacgctgagttaggttttttaggtgtcattgtacctacacgagtacaaacaccacgtttttgaggtgagtttaagtgagtaaattgtttctttttactattgaaacctctgtttaacgctggtgaatctgattttttagatttactttgtctaggtttacgtactaattggttaatagttggcattgaatgtcctcctctcttcattttttaattccacacatccaggtggttcatttttaggttaaataaaatttagtaagtgtaaaaacttactaattctcattcaataacgcaacaattgtcgcattaacattaatacctactgcttttcctaaagccgatttgctttcgaaataagtaatcggtatacttttatgattgatttggctaaatacttgagctaataaatatatctcaacatctttagcaataatcaatgatgtaacttgatcttttttcaacgcttttaacgtttgtttaagaccaactacaaaatgttgtttgttaaagcgtgcaactttttcattagacattaaatatcctccaaagttctgcttgcatcaacctttacaataataacactttatataataattagtcaacattttttatcattttctgtaaatattaaaagaaaagaacttggaacaaattaaagttccaagttactttcacattaattactcagtcacttctgcttcgtcagtttcagcaactggagtacccactttatcgtatttaacgtcactataacgtctcatacctgtaccagctgggataagtttaccaataataacattctctttaagtccaagtaagtcatcgcgtttacctttaatagcagcatcagtaagtacacgagtagtttcttggaaagaagccgcagataagaagctttctgtttcaagagatgctttagtaataccaagtaatactggttttgcagtagctgggcgtttacgttctttaaacgcttctctattagcatcagtaaagttatgaatatctactaatgaacctggtagaagtttagtatcaccagcttcaataattcttactttacgtaacatttgtctaaccattacttcaacgtgtttatcgtcaatttctacaccttgcatacgataaactttttgcacttctttaagtaagtagctttcagtcgcgtttaaaccagcaacagctaagaagttcttaggttcaatagaaccttcagttaatacttctccacgttctactgattggccaatttctactttaattcttgaagtacctgaagcaagataagatcttgtttcattagcgcctttaatcacaatttcttgttggcgatcttttgctaatttaatatcttcaacgacaccttcgatttcagtaattaccgcttggcctttagggttacgtgcttcaaagatctcttggatacgaggaagaccttgagtgatatcgcttcctgctaccccacctgtatggaaagtacgcattgtaagttgagtaccaggctcaccaattgattgagcggcaatagtaccaactgcttcacctacttcaactttttcacctgtagcaaggtttttaccgtaacatttttcacatacaccatgacgagtattacatgtaaatgctgaacggatatacattttttcaatacctgcatctgtaattttcttagcaatttcaggtgtgattaattcatcaggacgaataatgatttcattcgtttcaggatgacgaattgtttctttagaataacggccttcaatacgttcgataaatggttcaatcatttctgtaccttctttaatatcagaaactaataaaccacggtccgtaccacaatcttcttcacgaacgataacatcttgtgcaacgtcaacaagacgacgagtaagataacctgaatcagctgttttaagtgctgtatcggcaagacctttacgcgcaccatgcgttgagatgaagtattctaatactgttaaaccttcacggaatgatgaagtaattggtaactcaataattttacctgatggcgcagccattaatccacgcataccggctaattgtgtgaagttagatgcgttaccacgggcacctgagtcactcatcataaagattgggtttgttttttcaagtgattgcattaattcgccttgaatttgatctttagcatctgtccaaatttcaacaactgcgttgtaacgttcatcttcagtgattaaaccacgattaaattgtttagatacacgttctactaatttttcatgttcatctaaaatttgttgtttatctggaagtactacgatatcagatacaccaactgtgataccagctttagatgagaatttgaatcctaaatctttcatacggtcaagcatcattgatgtatctgtgatgctaaatctgttaaatacttcagcaataatattacctaagaattttttgttgaaaggtgcagtaagttcttgctcttcgaagtaagctttaagaccaccttcacctaattgtgttggatcaacaaaatatttatcaggtgttttatcttctaagttttcttgagtaggttcattaatatatgcaaatgaatctggaatgatttcattaaagatcactttacctacagaagtagctaaaattttattattttgttcttctgtaaatgtaggattattaagtgaacgtgcatgtaaacctatacgagtgtgtagatgcacataaccatttgcatatgctttaagtacttcatttgtatcattaaagattataccagtatttacagcatctttacgttctaaagttaagtaatagttacctaataccatatcttgtgatggtgtaacaactggtttaccatctttagggttcaagatattttgcgccgctaacattaacatacgtgcttcagcttgtgcttctttagataatggtacgtgtaccgccatttggtcaccatcaaagtcagcgttataagctgttgttacaagtggatgtaaacggattgcacgcccttctactaaagtaggttcgaaagcttgaatacctaatctgtgaagcgttggggcacggttaagtaatactgggtgttctttaatgacatcttctaatacatcccatacttcatcatccatgcgttcaattttacttttcgcatttttaatgtttgttgcgatttcacgttgtactaattctttcataacgaaaggtttaaataattcaagtgccatttcttttggaagaccacattgatacatttttaagtttggtcctaccgcgataactgaacgacctgagtagtcaacacgtttaccaagtaagttttgacggaaacgaccttgtttaccttttaacatatgtgataaagatttcaatggtctattacctggaccagttactggacgaccacgacgaccattatcgattaatgcatctactgcttcttgtaacatacgtttttcgttttgaacgatgataccaggagcaccaagatctaataaacgtttcaaacgattattacggttaataacacgacgatataaatcatttaaatcacttgttgcaaaacgtccaccatctaattgaaccataggacgaatttctggtggaataattggtagtacatctaaaatcatccatgaaggattatttccagaatttctaaatgattccacaacttctaaacgtttaattgcacgtgttaatctttgtccagttgctgattctaattcatcacgtaatgcttttaattcttcatctaagtcaatttcttctaataggtctttaataccttctgcacccatttttgctacaaattgacctgggtatttatcataatattctctgaattcagcttcagataataatgattttttctctaatcccgttggacctggatctacaaccacataagaagcaaaataaataacttcttctaatgatcttggagacatatctaataaaagacccatgcgacttggaatacctttaaagtaccaaatgtgagaaacaggtgctgctaattcaatatgccccattctttcacgacgaactttagattttgtgacttctacaccacaacggtcacaaaccatgcctttgtagcgtacacgtttgtacttaccgcaactacactcccagtcttttgtaggtccaaaaattctttcacagaaaagaccatctttctcaggtttcaaagtacgatagtttattgtttctggttttttcacttcaccatatgaccaagaacggattttttcaggtgaggctaaaccgattttcatataatggaaattatttacatcaatcaaggagcctacctccttcaatttagattagctgtgctatttgattgatttacatttactgaaactgacatcacatacataagatgcacatcagtgcgcaatctaaatcttgatgagattaaaattacgcatctcatatttattcatcttaaatctataattttattattcgttagtttctttttgagtttctggaacatctttttgttgtagatctactttgcgctcagttgcatcttcatcatcaacatcggccatttcgatttcattatcatgttcatccataacttttacatctaaacctaaactttgtaattctttcatcaatactcggaatgattcaggaacacttggtcttgaaatgttttcacctttaacgatagattcgtatgttttaacacgacctacagtatcgtcagatttataagttaagatttcttgtaatgtgtatgctgcaccataagcttcaagtgcccatacctccatctcaccaaaacgttgtccaccgaattgtgctttaccaccaagtggttgttgtgtaacaagtgagtaaggtccagttgaacgtgcatgcaatttatcgtcaaccatgtgagcaagtttaagcatatacattactccaacagaaatacgattatcaaatggttcaccagtacgtccatcatataatactgttttaccatcacgtgccataccagcctcttcgattgtagaccatacatcatcgtcgtttgcaccatcgaatactggagaagcaacatgaatacctaagtttttagcagccatacctaaatgtaactctaaaacttgtccaatgttcatacgtgatggtacacctagtgggtttaacatgatatcgattggacgtccatctggtaagtaaggcatatcttcttcaggaacaatcttagagataacccctttgttaccatgacgaccacacattttgtccccaacatggattttacgtttttgaacgatatatacacgaacaagttggttcacacctggtgataacgtatcatcgccttcttcacgattaaatactttaacgtctagaacgataccacctgcaccatgtgggacacgtaatgaagtatcacgaacttctcttgctttttcaccaaagatggcgtgtaataatcgttcttctgcagttaattctgtgacaccttttggcgttactttaccaactaagatatctccatctttaacttctgcaccgacgtatataataccacgatcgtctaagtttttaagtgcattttcagaaacgttaggaatatcacgtgtaatttcttcaggccctaatttagtatcacgtgcttcagattcgtattcttcaatatgaattgaagtatatacatcgtctttaactaatcgttcactcatgataacggcatcctcatagttatatccgtcccaagtcatgaaacctacaacgacgttacgacctaatgccatttctcctaattccattgaaggaccatcagctaaaatttcattgtattctacaacgtcacctacagaaacgattggacgttggttataacaagtaccagagtttgaacgtttaaatttagctaatgggtaacgatctaattcgccttcatgttcagttccattttcctcaactaaacgacgaactaagatttcattagattcaacgtgttcaacacgacctctatgttttgcagtaattgctgcaccagagtcacgagctgccacatgttccatacctgtacccacaaatggagcttcaggattcatcaatggtactgcttgacgttgcatgttcgcacccattaacgcacggttagagtcatcgttttcaaggaatggaatacaagctgtcgctgctgatactacttgtttaggagatacatccatgtagtccattttttcttttgccataacagtgttgttaccacggaaacgacataccacttcatcatctaggaaacgaccattttcatctaaacgagaattggcttgtgcaactacatagctatcttcttcatcagcagttaaataatcaatttgatcagtaattgaattggtatcaatatctactttacgatatggtgtttcgataaaaccaaattcatttacacgtgcataactagataatgagttaattaaaccaatgtttggtccctctggtgtttcaattggacacatacgaccatagtgagaatagtgtacgtcacgaacttccatttgtgcacgttcacgtgttaaaccaccaggtcctaaagcagaaagacgacgtttatgtgttaactctgctaatgggttagcttggtccatgaattgagacaattgagaactaccaaagaattctttaattgaagcaattacaggtctaatattaattaattgttgtggtgtaattgaatcagtatcttgaatagacattctttcgcgaacgacacgttccattctagataaaccaattcggaattggttttgtaacagttcacctactgaacgtaaacgacgattacctaaatggtcaatatcatctgtataaccaataccattcaataagttaaagaaataactcattgaggcaataatatctgctggtgtaatacatttcacttctgaatcaggtaatgcattaccaatcactgttgtagtgcgttcttcttcatcatttggaacatacactttaattgattgaatttctacaggttcatcaataacgctaccttctaactcgaacacttcactgtttgcatttgactctaaaacattcataatttcgtctaatttacgacgatctaaaactgttccttcttcagcaacaatttcacctgtttcgctgtcaacgattggttccgctaatttttggttaaataaacgatgttttaagtgtaactttttatttgttttatagcgaccaacacttgctaaatcatagcgtttagggtcgaagaaacgtgaatataataagctttttgcgttttcaactgttggtggttcaccaggacgtaaacgttcatagatttctaataaagcttgttcagtattttcagtactatctttttcaagcgtattacgtaagtattcactgtctcctagtaaatcgataatttcttgatcactagagaatcctaaagcacgtaataatactgttaaaggtaatttacgtgttctatcaattcgaacgtaaacgatgtctttagcatctgtttcatattctaaccacgcaccacggtttggaataatcgttgcgtcgtaattttcacgtccatttttatctattttttcattaaaatacactgatggtgaacgtactaattgtgaaacgataacacgttctgcaccattaattacaaacgtaccagtatctgtcatcaatgggaagtcacccatgaaaacttcttgttctttaacttcaccagtttctttgataatgagacgtactttaacacgaagaggtgcagcataagtagcgtcacggttttttgattcttctaaatcatattttggttcacctaatctataatccacaaattctaaagataggtttccagtgaaatcttcaattggtgaaatatcacggaacatttctaataaaccttcttttaagaaccagtcataagatttagtttgaatttctattaagttaggtaattctaatacttctgaaattctcgcataatttctacgtttacgatgtcttccatattgaacaacttgacctgccaaacagattcacccctcaaatattgtgttgaacttatacacaaaatttcacataacaagacaaaaagaaaacggcaacacaattgatgacaccattttcgattcttttcttattcttgtttatcgtactcattttgcgtaaaagtacacacttgttgaacataaatttttacattttataactatatcagaataccattttgaaatcaacctttttggctcttcagtatatagtaccctttacttttgttcacagtttctacattattaaatatttcttccattttctttttagcagaaggcataccttgctttttctgaatgacaacatagagttcaccttgattttttagcttttgatatgcttcttcaaagattcgatgaacaacatttttcccagctctaattggcggatttgttaatacaaagtcaaagtattcattctcaacttgtgacagaccatcactttctgtaatgataacattatcaatttgattttgctttttgttcttttcagctaaatgtaaagctcgatggttcacatccaccatagtaatttgatggtgtggtgacactttagcaatcattaaaccaattggaccataaccacagccaacatcaatgatacgtttacttggacctggtggatgttcatttaaaaacgtttgtactaataaatcagacccaaagtctacttttccttttgaaaaaacgcccgcatctgtcgttagttttaactgagatttatgataaaagtattgaattgttttttcatcactttgtacttcaggattttcatcataatagtgactcatgatttcacctctttatttgttcatctatttgattagaaaatgaattaaaaccccgttatcaacaataacggggttttaatttctcaaagaatgcaagtaatcattaacgctttcactctaaagtgactaagttaaaatgatttacttatatattaagttaagatactagaattattttaattctacagtagctccaacttcttctaattgttctttaagtttttcagcatcttctttagcaacagcttctttgattactttaggagcgttgtctactaattctttagcatcttttaagcctaagccagttgcttctttaactgctttaacaactttgatttttgaagatccagctgaagttaattcaacgtcaaattcagttttttctgcggcagcatctccgccaccagctgcaccagctgctgctacaggagctgctgctgttacaccaaattcttcttcaattgcttttactaaatcgtttaattctaatactgacatttctttaattgcttcaatgatttgttcttgattagccattttattattcctccatttattttaaaattttatgcgcaattattcagcgctttcttctttttgttctccaacagctttaaccgcataagcgaagttgcgtactggagcttgtaatactgataaaagcatagatacaagaccatcgtgtgaaggtaatgaaccaacagttttaacttcttctgctgagataacgttaccttccataacgcctgttttaatttctaaagcttcatgttctttagcaaatcctgagatcactttcgctggagcaactacatcatcagtagttgtagcgatagctgtaggaccagttaagaattcatctaagccttcgatacctgctttttcagctgcacgacgaactaatgtgtttttgtatactttatactcaacaccagcttcacgtaattgagcacgtaaatcagttacttccgcaacagttaaaccacggtagtccacgataacagttgaaactgaatttttaagttgttcagcgataacgtcaacttgttgttttttagcttcaataatagcagacattcagacacctccatttttatttttggtgcttttttaataaaaaaagcactttctacccacggcaaaaagtgcttgaaagatcattataataatcatcacgttcaagtcaattttagcctcggtaggatattgttttaagttaaagattaactcctactgtcttaggtaaaataatcacaataaataatataacttgtttattgtaatatgtcaattgttttttaaaaaaagactggaagaaaatgatcttatctttttcaaaataagcaatgattatctaccagtctacaatctattcatatatttgaaattaaagtttaaaagatgaagtatctactttaactccaggacccattgttgtagttacagcaacagatttgaagtaagtacctttagcagatgctggtttagctttagctaaaacatcttgtaaagcattaaagttttcaactaatttttcttcgtcgaaagatactttaccaatcgtagcatgtacgatacctgctttttcagcacgatattcaactttaccagctttaatttcttctacagcttttttaacgtccatagttactgtaccagttttagggtttggcattaaacctttaggtcctaatacacgacctaatttaccaacttcacccatcatgtcaggtgtagctactactacgtcaaagtcgaaccaaccttgttgaattttttgagcatattcagattcacccacgtaatctgcgcctgcttcttctgcttctgtaattttatcgcctttagcaaaaactaatacacgttgtgatttaccagtaccgtttggtagcactactgcaccacggatttgttggtcatttttacgtgtatcaatacctaaacggaatgctacttcaactgatgcatcaaagttagcgatactagtttctttagctaatttaattgcttcttcaacactatagtatttagtacggtcaactttattagctgcttcttgatactttttaccttttttagccatttattgttcctcctttagtggttttagcggaatttcctcccacgcttacttgtgtgatttacacaagttaagagcagataacagatgatgtcattaataaatattaatttactaaagactaatcatagacaatatatgttgtcgtttctgttacctgctatcgtctatcagtttatttcaaattcaaactcattttcatttaataattattgtacagtgatacccatactacgtgcagtaccttcgataatacgcatagctgcttcttcgtctgcagcgtttaagtcttgcatttttgtttgagcaatttcacgtacttgatctttagttactgtagcaactttagttttgtttggttcaccagaacctttttcaacgccagctgcttttttaagtagtactggagccggtggagttttagtaatgaatgtaaatgaacgatcttcatatacactgatttctaccggaatgattaaacctgcttgttcttgtgtacgtgcattgaattctttacagaatcccatgatgttcacacctgcttgacctaatgctggaccaactggtggtgctgggttcgctttacctgcaggaatttgtaatttaactactttttctacttttttagccacgatgtgcacctccttgatatcgtgatgtggtcacagggctcagttttgccctcccactcataaacatttcgtgacgaaatgagcgttctaaaaacgcgaccacattattttaacattaaacttaattaaaaatcaatagtaaaatttcatctttttaagcaaatcatactttataatttaaaatgattataatttttctatttgatcgaattctacttcaactggtgtttctctaccaaacatatcgactaatacagttaatttaaatttatctgcttcgatttcttgaacttcaccaacttgatttgcaaatggtcctgatttgatgcggacttgttcacctacatctaattctacatcaattgttttttctttaagtcccatttgttttaagatgaatctcatttcttcaggaagtaatggattaggttttgaacctgcacctgctgaaccaacaaatcctgtgacacctggagtattacgtacaacataccatgattcatctgtcataataagctctactaaaacatatccaggaaatgtctttttaacctgtttttttgctttcccatctttaacttgtgtttcttcctcttcaggtatgacaactctaaaaatttgctctgtcatattcattgattctactcttttttctaaattctttttaactttattttcatatccagaatacgtatgcactgcgtaccaacgcttagccccaacttcttcagacatgttgtcactccttacttttatctaaataattgaattaaattaccaatacctacgtctaatacccagaaaaagaccataaagaaaattactgtagctactacaatgacagtatatttaaaaagttcttctttcgtaggccaacttgttttttccatttcgcttttaacgccttggaagaaactttctttattcttacttgcgtctttatctttagccataaccttacctccatgcttttcaaagtatatacttataaactcattactttgattctttatgcatcgtgtgttcattacatctggaacaatatttcttcagttgtaatctcttagctgatgtttcttttttaggtacattataatttctgctaccacacatttcacaaactaaaggtacttttctcacatcaattcacctttactcatattaataccagtctactatacataaacttataataaactgtcaaactcgtactaaaatacttaacgtttgtatttcaataaatattgtttcatttttattttacaacgttgaatactattgtaaactactttatcttttacatttagtttttttgctatttctgatggggaataatccagtagaagtaaatttgcaacttctctttcaaacatacttaacttcttaaaactgtctatcaagtcttctttacttgacctagttaaatatagttcttccgtcctttttatcatttgattcaaacgagattctactacacattcattgattaacaattgttgacgttgattaaacgcataacgttttctccaaaaatcttttttcacagaataaactagacgatttaaataatgttcgaatggaacattcgtattaaaattaaatgtgtgtaaagctaaatatatctttaacgaggtatcttgaattaaatcttctagttcttgatgatctatatctagcatcctaaacttcatcataagtttaggacgtatcacattcattatatttgcgaataactgttctttctccaatgtattttggctatattgaaaagctttaaatatatcttctagttgtcgaaaataataagtcatatacaaaacctttctttataagttaggcacattgtataagacgcatcttttgaatagcaagactgtattatttacgttttttaccatatcctcgtcgtattttttcaaattctgcaagtacatcttttgataacgaaattcgagttcttggtttacgttcattaaaatcatctactgatttactaaccgtcattgcattctcttttaaatctcgccacatttctctagatgaaacacgatatgcacctgctccaaaaatagcatgttgctcgctcatatcgctggtcactactgtaatatgtgtcgtatgtttattgtataaattgtatacataacgctcaatatagctatctgcagtttctttttctttcgtaaaaactgttttaacaccatgataaatgtattctctttctataccagattgttcatatgcatcaaatacacatacaatctcatcggcgacaactgcattgtaattggcaatcacatctaagagttgttcacgtgcttcctctaaactttctcttgctactttactcaattcccttgattgaccaatcatattgtatccatcaataattagatatctatctttcattgggtatctccaatttgatatcgtttacgatatacttcatacatcattaaactagcagctacagaagcatttaagctattaacatggcctaccataggaattttaatatagaaatcacatttatctttaaccaatctactcataccttgcccttcactaccaattacgatagccagtggcatatcagcagccatattgcgataatctgtagcattatccgcttcagctcctgctacccaatatccattatttttcaactcatcaattgtttttgataaatttgtaacacgcatcactgggatatgttgaatcgcaccagttgacgcttttgcaacagtttgtgtgagcgcaacagaacgtctcttagggataatcactccatctactccgcttgcatctgccgttctaatgatcgaaccaagattatgtggatcttctaacccatctaaaataattattgtagaaaggccttctttttctttttgagattgaataaactgatcaaaatctgcatattcgtatggtgcaatcagtgcagctacaccttgatgaggtgcatttgctaaattatctaatttggattttggaacagtttgtataatcaatttctgtactttagcattttttaaaatatcattaatttgctgctttcttattccttcttgtatccaaattttatttattgtatgaccagacacaattgcttctttaacagcgtgtctaccgacaataacgatatcttccactatgttcacaacctttcatcaacaatttgtacaatcatatcaagtaacgcatctaatcgttcatttcgatggtctaaataaagaaatcctataatagcttctaaacctgaacttttacgatacgtttgtatatctgtatttttagctttcgtataacttttagcgttacgccctcttctaacaatatctcgttcttcttcagtaaaccattcttttgtgattaatacctcaagcgtttgtgcttggctttttgcagacacatattgtttcgatacttggtgtaagcgattcggtttactctgtaatttaagcacaatatattcacgtacatgctggtctaatacagcatctcccatataagctaacgttaatgggtttagtagcttggcattcatattaaccccttctaaatcttacaccttgaggcgtatcttcaagaataatattttgttcttttaacatatctctaatttcgtcagctcgagcaaaatctttatttttacgtgcttcattacgttcttcgataagtttttctatgtcttcatcaagtaatacatcattttcttttccttctaatggtacgcctaatacgtcactaaaaatgtgatatacttctttaaagcgctgaatcactttagttgatgttgtattttctaacacatatttattagctaattttgataaatcataccatgcagttacagcgtttgctgtattaaaatcatcatccattacagcttcaaattgttttaaaatatcattaatttgatcaatatagtctgtttgtgtttctaaatcagttgcgattgcttctctttctttaattaattgataactattgcgtatacgctctaatccacttttagcagcattcactaattcaacgttatagttgattggacttctatagtgaacactaatcatgaagaaacgtaatacatctggatcaatttctttaataatatcgtgtactaaaataaagttacctaatgatttactcattttttcattatctatattaataaaaccattatgcatccaataattagcaaaaggcgcgtgattatgtgcttcagattgcgctatttcattttcatgatgtggaaattgtaagtctgatcctcctgcatggatatcaattgtttttcccaattcatgataagccattacagagcattcaatatgccatcctggacgtccttgtccaaatgggctctcccaactaatttctccaggttttgcctttttccatagcgtaaaatccaatgcatcctctttttgttcacctgcttctatacgagcgccaacttttaaatcatcaatagactgatgacttaatttaccatatccatcaaatttacgggttctaaaatacacatctccattactttcatatgcataaccgtcatctacaagttgtttaatgaagtcaatgatttcatccatatgattcattactcgtggattagatgtcgctcttttaacattaagtgcccctacatcttcatagaatgccttgatatatcgatcagcaatttctggcacactttcatttaattctttagaacgattaatgagtttatcatctacatcagtaaaattagatacgtaatcaaccgtatagcctttatattcaaaatatcgacgtacgacgtcataattaattgctggacgggcattaccgatatgaatgtaattatatactgtaggtccacatacatacatcttaaccttaccaggctcaataggcttaaacgcctctttttgacgtgttaaagtattatataatgtaatcatctttaatctctccgttcttagctttttctaattgtcgttctagttgcttaatttgttcaaataaaggatcaggcaaattacgatgatcaaatgttttcccaattcgttttccttcttgtttaacaatatgacctggaatgcctacaactgttgtataacttggcacagattgtaagactactgaattcgcaccaatattaacattagaatcaatttggatatttcctaaaacctttgatcctgctgcaattaaaacattatctccaatatctggatgacgctttcctttttgtttacctgtacctccaagtgtcacgccttgataaatcgttacgttatctccaatcgtacatgtttcaccaataactacacccataccatgatcaataaatagacgttttccaattttcgctccaggatgaatttcaattcctgtaaaaaagcgagatacttgtgaaatcattctcgccaaaacgtagtgttttttattatataatttatgtgcaattaagtgactccataccgcatgcaagcctgcataagttgtgattacttcaaatgttgtacgtgctgcagggtcttgttcaaataccatttttacatcatctttcattctttttatcaagacgctcgcctccccattttctatatattatgaatatcttacagtccatgtatcattcaaatatttaaaaaaagcacccctaacattaactgctagaggcgctattgcacggttccactcttcattttagataaagtaagttgatgaacatactagtctaccttatcatactcatttctatatttaattgaacattcaaaggtgcattcgatatagataatgatatgctcacagcaaccgcatactctctaacaacattatcgtatatttactaatcctttaactaacatatgtttaatcttatcataagaagttttttataaaatttcaagtttaaacatgtgtgtctgacttattatattaacattgttttaaacatatttttttaaacgagatagtactttttcttttcctaatacttcaattgtattcggtaattcaggaccatgcatttgaccagtcactgctacacgaataggcataaataattgtttacctttaataccagtttctttttgtacttctttaatcgtttttttaatttcagcagcttcaaatggttcaagcgcttctaatttaccatataaatgagacattaattcaggaacttgttcgccatttaatacctcttgttcttcttcacctaatttaggcatatcatggaagaacatttctgataacggaacaatttctcctgcataactcatttctttttgataaaggccaattaatttacgtccccattctttatcttcttcacttggattttcaggaattaaatttgctttgatcaagtgtggtaaagcaagctcaaatactgtttctgtatcttttgttttcatatattggttgttaacccaagctaatttttgtctatcaaacattgctggagatttagaaagacgttgttcatcaaaaatcttaataaattcttctttagaaaagatctcatcttcaccttcaggagaccaaccgagtaaagcaataaaattgaataacgcttcaggtaaataacctaaatcacgatattgctcgataaattgtaaaatttggccatctcgtttacttaattttttacgttgttcatttacaattaatgacatatgcgcaaaacgtggtggttcccaaccaaatgcttcataaatcattaattgcttaggtgtatttgatacatgatcatctccacgaataacatcagaaatttccatgtagtgatcatctactgctaccgcgaaattatacgtagggacgccatcttttttcacgataacccaatctccaatattattagagtcaaaagaaatttctcctttaaccatatcatcaaatgtatatgttttatcttttggaacacggaaacgaatagcgggtttgcgtccttcagcttcaaattgttgacgttgttcttctgtgagatgtgcatgtttaccgccatatcgtggcatttctccacgagcaatttgagcttcacgttcttcttctaattcttcttcagtcatgtagcatttgtatgctttatcttcatctaataattgttgaataagtggattatagatgtctgcacgttcagattgacgataaggaccatgacctttgtctttatcgatagattcatcccaatctaatcctaaccattttaaattatcaaattgtgaagattctccatcttcaagatttcttttactatctgtatcttcaatacgtactacaaaatctccatcataatgtttagcaaataaataattaaataatgcagttcttgcatttccgatgtgtaaatatccagttggacttggcgcatatcttactcttacgcgttcactcattcgtttcactcctaattttgttattcattctttatagcgaatgatttctttcattagaaaaaagttatcccaaacaatctttaaagagtcgtttttgaataactttaacttctaatctatacttaaatcaacttcgcatttccttattattgtagcattaattggctggtttgataagtctattgctactgttgttacgttactcagcaatatctcataacgaaaaatattatacaataattcatcaatgactacgtttcacatgaaactctttttcctattaacttaaggactcctctatagtcttagcaaatataatacgaccagatgatgtttgtaataaactaatgacttctaattcaacctgtttccctataagagatttggcatgatctacaacaaccattgttccatcatctagatatcctaccccttggccaggttctttacccattttagttaataaaatattaagtcggtcaccttgatgaacattgggtttaattgcttctgataaatcattaacatttaatgcagtaatcccttgaacatgacataccttattcaaattgaaatcggttgtaatgacatgggcatgatagacttgagctaattcaactaacagtttgtcaatatcactatgagatttttgaggatgaatcacacgagttggatagtctaaatcataaagttgatttaaaatatctaatccacgttgtcctttttcacgtttgatactatcattagcatctgcaactacttgcaattcatttataactccttgaggaataagtatttctccatctataaacccgcatttaataatatctaaaattcttccatcaataattgcacttgtatctaacagtttaggtatagcactgatattatttttagacattgaacgtgctatattttctggcaaaaacataagcatttcatcacgctttttcaaaccaaactggaatcctaaataacataataatagtgtaataataataggcacaaggtgatttaatatagaatttcctatcatttctaaaataaatgaagccattactgaaataaataaaccaacgactaatcctagtgtagcaaacaaaatttcgactgcactacgtttcataatccacatttcagcttctttaagtaatcgtgttactttattaataaatagaccaaatattagaaagaatacaatcatccctactaaaccatcaatataatgattagtataaatgggtggggtgttcatacctaaatcatttaaaatttctggaattaacatgattccaaatgatgcaccaagaatgatgtagattataataacaattccttttaataccttcatacgttatcacccctttaaatgcctatgatgagcgattactaaacgcatattttaaggcatcatgtaccgttgtcacgccaacgacctgaacaccttctgggaatgtccatccacctatattcgttttgggaataatcactctcttaaatcctagttttgccgcttcttgtacacgttgctcaatacgcgatactcgtcttacttcaccagttaatcccacttcaccaatataacaatccaaaccatctacggctttatctttaaaacttgaagcagtcgctacaataatacttaaatctacagccggttcagtcagtctcactccacccgctactttaatgtaagcatcttgttgttgtaaaagataattttcttttttctctaaaacagccataagcaaactaagtcgattgtggtcgatgcctgtggccattcgtcttggattattaaatgtagtaggtgttactagagattgcacctcaatcaatagtggtcgtgtgccttccatagtagccacaattgttgatcctggaacatttgtagagcgttcttctaaaaacatttctgaaggattttgtacacctttcaaaccactttgtttcatttcaaaaatacccatttcattcgttgaaccaaaacgatttttaactgctcttagaattcgataagcatggtgttcatcaccttcgaagtataaaactgtatctaccatatgttctaatagtcttggaccagcaatttgtccttcttttgttacgtgacctactataaaagttgcgatattcatttgttttgcaatattcattaaactttgtgtactttctcgaacttgtgatactgagccaggtgctgaactaatctcaggatgataaatcgtttgaattgaatcgacaacaagtatatctgggcgctcttgttccacggtttgatgaataacttctaaatctgtttcagctagtacatttaaattactagagtcttcctctagacgatctgcacgcaatttcgtttgatttagtgattcttcacccgtgatataaagtacattaagtttctgtgataacgatgcacaaatctgtaataataatgtagatttcccaatacctgggtcgccgccaattagtacgagcgatccactaacaattccgccaccaagtacacgattaaattctttagagtccgtttgaactcttggtgttgtctcatgcttaatactatttaatttctgtacttttgcttgtgtctcttttgtctttacaccatgttttggattggaagtcttttcaataatttcctccatttgattccaagcaccacaatttggacattttcccatccatttaggagactgatatccacaagccatacattcgaaaattactttttttttggccaaaactgcacctccgatttttttgaacatatctattttatatgtatccagttataatgacaaatttaaatatatataaatgaaaagaagagcctaggatttaatgactcctagactctgaatttaaactcattttattcttctgttgctggttcttttgtatcttctatattattttcttgtttatcatggatatcatacttgaattcattgccatcatgatcaattgtgacttcttttccttcaatttgattaccatcaagtatcaattcacttaaattatcttcgaccgttttttgaattgctctaattaatggacgagcgccgtattctggatcatatccttcttcagcaattttttctttagctttatcagtaactacaatattaatatcttgttctgataaacgttttgttaatttatttaccatcatagtcacaatttctttaagttcatcttttgttaatttatggaaaacaataatatcatctacacggtttaagaactcaggacggaatgaatttttaagttctttcatcatagttttacgaattgtttcataatcttgtccttcagatgcgccaccgaatccagcgaaacgttgatcttgtagttcttgtgctcctacatttgatgtcataataataacagtattacggaaatcaacttgacgtccttttgtatcagttagatgtccatcatcaagtacttgtaataagatattaaacacgtctggatgtgctttttcaatttcatcaaataggataacagaatatggcttacgtctaactttttcagttaattgaccaccatcatcatggcctacataacctggaggcgctccaactaaacgactcacagcatgtttctccataaattcactcatatcaacacgtatcattgcgtcctcttcaccaaacattgattcagctaatgcacgggcaagttcagttttacctacaccagttggtcctaagaaaatgaaactaccgattggacgtttaggatcttttagacctgcacgtgcacgacgaactgctttactaatagaagttacagcatcgttttgtccaattactcgatcatgtaatgtttcttctaaattaagcaaacgatctgactctgtttcattaattctagttaatggaatccctgtccatcctgcaataacttcagcaatatcttctttagataatgatgttgattgtccgccttgagatgtcttccattcatttttagcatcttcatattgtttttcaagttttgattgtttatctcttaagttagctgcattttcaaattcttgtgcatggacggcagcatctttttcatttttaactttttcaatttcttgttcaatctcttttaaattacttggagttgtgtgactttttagtcttactttcgaacttgcttcgtcaatcaaatcaattgctttatctggtaggaaacgatcagatacataacggttacttaatttagcagccgcttccagtgcttcattagaaatattaatacgatgatgcgcttcgtagcgatcacgtaaaccttttagaatagcaacagtatcctctacagatggttcatcaacttgaataggttggaaacgacgttctaatgcagcatctttttcaatgtttttacgatattcatctaatgttgttgcaccaatgcattgtaactcaccacgcgctaacgctggttttaaaatattagatgcatcaattgcaccttctgcaccaccagcaccaactagtgtatgcaattcatcaatgaataaaatgacattacctgcatgatggatttcatccatgacttttttcaaacgttcttcgaattcaccacgatatttagtacctgccacgactgttcccatatctagtgacattacacgtttattttttaacgtttctggtacttcattatttacaatagcttgtgcaagaccttcagcaatggctgttttacctacacctggttcaccaataagtacagggttatttttagttctacgacttaatacttcaataacacgtgtaatttctttatctctacccacaactggatctaaagtaccgtctttagcaataactgttaagtctcgtgctagtccatccaatgtaggagtgttgtttgatttatttgcagttgcatttttagtattcatttcaggactacctaatgctttcactacttgtgcacgtgctttagtaatattcaaatctaagttagcaaatacacgtgctgctactccttcattttcacgaattaatcctaataaaatatgttctgtacctacaaagttatgatgcaattttcttgcctcatccattgatagttcaatgacttttttagctcttggtgtatagtgcaacgtacctgaatgttcttgaccatgaccgattaatttttcaacttcttcaataactttatcttcagtaatattaaaactttcaagtactttagcagcaataccttctggttctttcattaatccaagtagtaagtgctcagtaccaatgttcgaatgatttaaacgaattgcttcttcttgtgcatgtgctaatacacgttgtgcgcgttcagttaatctaccaaataacatatcgtttacaacctcctaatttgtatgttttcttaatatatttgcccgtttttcatttacagatacgttttcatcttcctcattatataaaaacgcagattggatacttaccattaattcattaaacttaaagttacttaaatttaaatatcctaaatctatgcctaacttaatttcacttaatctatatgacgcttcttccattgatatcatacggctattttgtaatattcctaacgaacgataaatacggtcaagcgtttctaattcactatattgtgttaaacgttcacgaatttgcatttcttcattaataatttgttgaactacttctgtcaactgatcaataatatcttcttccgtcttacctaatgtaagttgattagaaatttgataaatatgaccataaacttgtgaaccttctccatatatacctcgaatcgtaaatccaaaacgattaattgtttgtgcaatacgattcatacgtttcattatagataatccaggtaaatgaagcatcacacttgctcgcattccagtcccaatatttgtaggacaagtcgttaaataacctaaatcttcatcgaaactaatttctaattgttcatcaagaatatcatcaatgtctgaagccttttgatataaatctatcagagataaatcattacccattgcttgaattcgtacatgatcttcttcattaatcataatactcaaagattcatcttcatttaataacaccgctgaagctggttgtttaatcaattctttactaattagatgtttagccactaacttcatcttactttgttggtccatggtatctaaacgcattaaagataaattaggtagtgcatcttgcacttcattgattactctaaaacctgcttgttcagatggaaacattaaaggatgaacatgattttctaaattacgtgctaaacgaatacgcgaagacattacaataggagattcatctgtttctttcatccattcactaatatgtgcacccatatcattcatcatgctccatctcgctttcatgtttcaaggctttaatttcatctctaatgacagctgcttcttcaaatttttgcttttcaattaatacatttaagtaattcgttttttcttcaatttgtttttttattgccagtttatgatgtgaagaacgaggcatcttacctacatgttcaaattgtccaccttgtactcgtcttacaatatcaacaatatcctctttaaatactgcatagcaatttgcacatccaaatttacctacatgagctatatctttcaatgtcatgttacatgtaggacatcgtttttcttcttgaaatgctacttcatgaaaatttaatccgtgtttagttgctaaatgttgtaagatttgtttgactacaaaggcttcttcaatatcatcttggaactctgaatgtgatgcagcatgttcttgttgattccaaggatgctctccttgcgcacattctgaacacacccacttttcagaggtaccatctttactttttactgtgagtttaacctctgcttcatttaaatgacaattttcgcaaagcacacatagacacctcgcttttttttattatttattaatagtaattaatgataggtaataatcgtttgagaatatttgctctaataatatctctagaaacaacatccattgatagtgtttcacgatcaataatcacttgaatcattcttgcttctctatcactaattaatcctttatctaacaaaccatcaattatataatatgcttgttgttgagatatcgaaggaccaattaattgcaatagatgattaatataacccgttgcatctttattttcaattttcgtgattcggatatatcctcctccaccacgtttactttctatttcataaccatgttcatttgtaaatcttgttttaataacatagttgagttgagaaggcacacaatcgaaacgttgagcaatattagctctttgaatttctaccatatcttcattactttcttcaaatagttgtttaatgtattgttctatgatgtcagacatgttgtgcatgatttaccaccccttttgaccttctttgactatattatatgaccaactttgacctttttcaaccaatttgttttttttatttaaaaatattaatgttacttctattattttattgtattatataagataaagagaattttaaaggagtagaattatgcatattcttattgggatcattgggattattgtctttttagcgctagcatttttatttagttcagataaaaagaatgttcgttggcactatgttggattattattaattattcaacttatactcgcatttattcttttgaaaacgactgctggtattacaattatcggtggtatttcaaatggatttaactatttgttacaaaaagctgctgaaggagttaattttgtttttggaggatttaaatttgtagatccaaacaatccaccattcttctttagtgtcttattaccaatcgtatttatttcggcattaattggtattttacaatatactagaattcttccatggattattaatgtgttagggttcttaatttctaaaattaatggtatggggcgtttagaatcatataatgcagtagcagctgcgattcttggacaatctgaagtatttatttcattaaaacaacaattaccatatatacctaaacaacgtttatatactttaactgcttctgcaatgtctactgtatctgcatcaattatcggtgcatattttacattgattgaacctaaatatgttgttacagcggttgtattaaacttatttggtggcttcattattgcttctattattaacccttataaagttaatgaagaagatgacaaattgctagtggatgaatcagaaactaaaaaacaagcgttttttgaaatgttaggtgaatatattttagatggtttcaaagtagcagttatcgttggtgcaatgttaattggctatattgcaatcattgctttattaaatggccttgtaagtggtatttttagtttaatttctggcggagcaatcaaatgggatttccaaacgttaattggttttgtatttgcaccatttgctttcttagcaggtgttccttggcaggatgccgttaaatcaggttctgtgatggcaacaaaattattatctaatgaatttgttgctatgcaatcacttggaagcttgaagggtatttctgagcatgcaaaaggtattacgtctgtatttctagtttcatttgctaactttagttctattgggatcatttctggtgcgattaaatcacttaactctgaaaaaggtgatgtcgtagcacgttttggtattaagttattattcggtgcaacacttgtatcatttatttcagctgctatcgctggattcttcatttaataagaaaaagcttgagattttgatctcaagctttttcttatttaactatatgttcaataaaatactgagttatacgatagtcatctgttaattctggatggaaagacacccctaggtatttcccttgcttaacagctactattttatcactaatagaacttaatatttctacattattttctacattaacaatatgtggtgctcttataaagacaccttctatatcttttgcaatacctttaacatctaactcagcttcaaaactatctacttgtctaccaaaggaattacgcgcaacagtaatatctaatttttttagatatcctgtctcaccttctacatcttttgcaagcacaataagacctgcgcaagttccaaacattggtaaatcagattgttgtaatttttctttaaagccatataaatccataagtcttcttaaagttgtagattcaccgccagggagaataagaccatcaatttcatctaattgttcaactttcttaactgctataccttcgtgaccacttaattcaatgtgacgaatgtgttcacgtactgcaccttgtaacgctaatacaccaatcttcataaattaccaaccacgctcttgcatacgttcttctaatgagattttatttatatctaaacctttcattgcagttcctaattcagctgctaattttccaattaattcataatcttgataatgagttgtagcttgaacaatagcttttgcaaatttttctggatcttcagatttaaaaatacctgaacccacaaataccccatcagcccctaattccatcattaaggcagcatcttgaggtgttgctacaccacccgctgcaaagtttactactggtaaacgaccttcttctttaatttgttttaatacattatatggtgcacctaattctttagcataagtcataatttcatcgtcattcattacagttagacgactaacctctgaattaacttttctcatgtgacgtacagcttctacaatattacctgttccaggttctcctttagtacgtaacatcgctgcaccttcgccaatacgtcgtgctgcttcgcctaaattacggcaaccacaaacaaatggtacagtaaattgatcttttcttaaatgaaattcttcatctgcaggagtaagaacttcagattcatcaatatagtctacgcccatagcctctaatacacgtgcttctgtaatatgaccgatacgtgctttagccattactggaattgaaacagcattcattacttcttcaacaattttaggattggcactacgtgctacaccaccagctgctctaatatcagatggtacgcgttctaaggccataactgctactgctccagcttcctctgcgattctagcttgttcagcattaacaacatccataatgacgccgcctttttgcatttcagccataccacgtttaactctttcagatcctacaattttagacatttataaaaccccttttcaattgattaaatccattttaaaatataaactgatatttaaaaaggtacaattttaataaaaaattaggggtcagatttatgacgaagaaacaatcattatatatttctttatatgaaaagttaaaaaaacaaattattgaaggtgtatatgaatcaaacgataaatttccatctaaaagacagttgagcgaacatttatcacttagtcatactacaattgagcatgcctatcagttacttttagatgaaggatttatatattcaaaaccacgttcaggttattatgtttcagaaattcaatcattaccagtaacaaatagttaccctgaaataagtgatatattagaaactgataaagctacacaggaaaatacgtatcagtatcaattcaatttagctgaaattgatgctaaacattttcctagtcatttatttaaaaagtatgctaaagaagtatttgaagaagatcaacttgcccttttgagtaaaggaagcgttcaaggagaattcaacttaagacagcaaatttctcattatttatttaatagtagaggagtatcttgtcatctagatcaaattataattggctcttcaactgaacaattattaaatatggtcactgacttattaaaagattcatcatttattatagaacaacctagttatccacctattaaacatgtactggataagcatagaataagttatacacaagctagagtagaaaaagatggaattaatatcgatgaagtctttcaaaaaaataatgatattttatatatcacaccatctcatcaatttccaacaggatatgtgatgagtttaaagaagcgcacacaacttataaaatgggcacaacaaaagaaggaacgatatattattgaagatgattatgattcagaatttagatatttcggaaaacctattccagcattacagaatttagataaaaaacaaaaagtaatatatattagtacattttcgaaatcgctttatccaagttgtcgtatggcctacattgtcttaccaaataaactgctaaaattattccgagagatgcagtatgttgaaagcaatactgtgcctgtacatttacaacacatggtagcacaatttatggcaactggtagctttgaacgtcatcttaataaaatgagaagaatatataaaaataaattaacttttattttagaaaaactaacaccatataaagaacaattgaaaattgaaggcgcactaacaggaatgcacttcacacttgtagttaaaaataatttgacaataaatgaatgcataaaaagaacgaaaaaatgcaatcttaaattaacaccatatccttacaacaacaaaaaactacaacatcctaccttcttaattgggtttggaggtatcccagaagaaaaattagagaagcatgttaatgctcttattaaagcacttacagtttaaatagaggaaatgagttctgactcattttggattggtagtcattgaacgtggacttttttatgaaagtcactatgctaaccatccgtagtgtatattcatttagtcatcttttaattagttatatatagatatatattttaaaataaaaaaaagagacctcacggtctcaatatcaactcatcgcatccatacaatgatttgcctggcaacgtcctactctagcggaacgtcagtccaactaccatcggcgctaaggagcttaacttctgtgttcggcatgggaacaggtgtgacctccttgccattgtcaccagacaagtgaatgattatacattcaaaactagatagtaagtaaagatttgcgtcgcaaaacttgaaaaaattgattaagtcttcgatcgattagtattcgtcagctccacgtgtcaccacgcttccacctcgatcaaactctccataaaaatttatgatgtttgattagctcataatactaaatagtgtttgtaacatttaagttactttattggaattaacgttgacatattgtcattcagttttcaatgttcatttgatattaattaaatggtggagactagcgggatcgaaccgctgacctcctgcgtgcaaagcaggcgctctcccagctgagctaagcccccatatttttaaagaagtcgggaagacaggattcgaacctgcgaccccttggtcccaaaccaagtgctctaccaagctgagctacttcccgtatattaaattaataattttaaatggcgcgcccgataggagtcgaacccataacctcttgatccgtagtcaaacgctctatccagttgagctacgggcgctatatttaaattggtgccgaggaccggaatcgaaccggtacggtgatctctcaccgcaggattttaagtcctgtgcgtctgccagttccgccaccccggcaaatataatggagcggaagacgggattcgaacccgcgacccccaccttggcaaggtggtgttctaccactgaactacttccgcatattaaaataaatcgtatgagccatagaggattcgaacctctgaccctctgattaaaagtcagatgctctaccaactgagctaatggctcaaagatggtgccggccagaggacttgaacccccaacctactgattacaagtcagttgctctaccaattgagctaggccggctaaaaagtaaatggtggagaatgacgggttcgaaccgccgaccctctgcttgtaaggcagatgctctcccagctgagctaattctcctatcaagtatgcctggcaacgtcctactctagcggaacgtcagtccaactaccatcggcgctaaggagcttaacttctgtgttcggcatgggaacaggtgtgacctccttgccattgtcaccagacaataacttactcaaataattatattactaattaattaatttttcaatagttaattttacactttattaaaattctttttacaagtgttttacaaaattaactttcgtttttgacgacttttatatcttataataatcaaagtctaatgtcaacaattttttaaaggttttttaaattaatttttaaaaaggatttaatttttgaacactcatagtatactaccacatcatatatataatatctagtcttttttaattaattttcctttttatttttcataaaaaaacgttgcttaccttagcaagcaacgcttttaatttatattaatcttatttttgtctcatgtaagggaataataatacatctctaatagatggtgaatcagttaacaacataactaaacgatcaattccaattcctagtccgcctgttggtggcataccatattcaagcgcttcaatgtaatcttcatccatttcatgagcttcatcgttaccttgttctttctcaacaagttgtgcttcaaaacgttcacgttgatcgattggatcatttaattctgtgaaggcatttgcatgttctctacctacaataaacaactcaaaacgatcagtaaatcttggatcttctggatttttcttagcaagtggagaaatttcaattggatgtccataaataaatgtaggttgaattaatgtttcttcaactttttgttcaaagaattcatttaaaatatgtccatatctcatgttttctgtaatttcaataccatgtgctttagctaatgctttagcttcttcatctgttttcacattatagaagtttacacctgtagcctctttaacagcgtctacaatatgaagtcgtttccaatctgattctaagtcgatttcttcgccattatattgcacttttgctgaacctaatacagtttgtgcaatatatctaaccatagattctgttaaatccataatatcatgataatcggcatatgcttcatataactctatcatagtaaactcaggattatggcgtgttgatacaccttcattacggaatacacgaccaatttcataaactttttctaatccgcctacaattaatcgttttaaatgtaactctatcgcaatgcgcatatataacgttgcatctagtgcattatgatgtgtaacaaatggtcgagctgcagcaccaccagcgatttgatgcatcattggcgtttctacttctaaatagcctctttgatttaaataatttctcatttcttggatgattttactacggttaataaatgtacgagtactatcttggttagtaattaaatctagataacgttggcgatatctttgctcaatatcttgtaaaccatgaaatttatcaggtaatggtcttaaagctttagataataatgtaaatgattttgcttttactgataattcgccagtatttgttttaaacatgacaccttcaatacctacaatgtcacctaaatccgttgttttccaaaggttatcaaaaggttcttcgccaatttgatctttacgtacataaatttgaatttgacctgttaaatcttgtacatgcgcaaatcctgctttacctttaccacgttttgtcattaaacgccctgcaatagaaacatgactttcatcttctttttcatgtaattcttctttagaaaaatgatcccatttttcttttaattcacttgcagtagctgtacgttcaaagcgtttaccaaacgggtcaattcctaaatcaataagttcttgtaatttttgtcgacgaacctgcatttggtcattcatttcttctgacattactctctctcctttaaacttcctgttttactattaatggatgttatgtacttattaaaaatattgtaaaatattttccattcattattttatacatagtcacatagttaaattcttaaaatatatttatattttaagaatttaagcacttatcttagcacttagtctttatatttcttaatcgtatcatctggaaaaactaaatcatgaattttctgatttaatcgtggattctgtttgtccgatgcaatatcgttcaacggtataagtacaaaagcacgttcttgcattcgtgggtgaggtacacttaaattgtctgtttcaataatatcatcactatataataagatatctatatctaatgttctaggaccccaacgtatttctcttactcgatgcagttgttgttcaatgtctaaacaatgcttaagcaattgttgaggtgacaactctgtttcaatctctaaacacaaattcaagaaattaggctggtcagtatagccaatcggtgcagtttcatatatcgatgattgttttgttacctttatacccttaatgtttccaattaaatcaattgccttaagaagttgttgttttctatcaccaatattacttcctaaacctaaatatgcttgtaccattaacgattctccctcactatttcaatacccacaccatcgtaatgaccaggtataggtggattttctttagtgattctgactttcgtttccattacacgattatagtgtgaatttatacgttttgcaatacgttcagctagatgctcgattaaattgcaaggtgaaccttcaacaatatcttttacatcttcaaatacttcaccataatgcacagtatctttaacattatctgtctgccccgcttttgataagtctacttttaacgttacgtctactaaaaaaatttgacctatttcattctcagctgtgagtgcaccatgatatccataaaacttcatccctttaagaaagatcatgtcgttcattttcattctccttcaaaaaatctataccttgagctaaacgtacatttaattgaacattatgtacgcgaactgcttttatgcctttcattataccataggcagtggtagcagcagtggcctcatctctttcttttggtgtcgtatcagtagaaatcatctctctaataaaacgtttacgacttgtcgctaataaaacaggatactctgtagcaactaattcatctaatcgagccattacttcattttcttcttttctacttttagcaaatccaattccaggatctaaccatattttatgttttggaattcctgccatttctgctttatttgcttgctttataagtgttaatagcatttcttctacaactggttggtcacggtgtccatctccattatgcattaacacaatttccgcttcatatttagcaactacatctaaaatatgaggatcatataatccagcccattgatcattaatcattgtggcccctaatcttagacaagcttcagcaacttcactgcgatatgtatcaatggaaatttgtacatttagtttcaccaattcttctacaactggcacgacacgttgcatttcttcttctaaagacacttctgtatgcccaggtcttgttgatacgcctcctacatcaataatatctacgccttcatcaatcatttctttagcacgtgtaactgcgttatcaattgaattatactgaccaccatctgaaaatgaatcaggcgttacatttaagattcccataatttttgttttacccactatcaatcatcctttgttttttaaaataaatatgtatactcacatgatacactcatttagtctatatttcagtattgttaactgagagaacctttatactaaaaagtaaaatagctggcttcgccttttacgaaaccagccatttcttatttaaaacatgatattcaaatatcaacttatatcatcattagtcatcgaatgaatataatggtgtagataagtaacgttcaccattacttggtaatactgttacaactgttttacctttacctaactcttttgctttttcgattgctgcataaattgctgcgcctgaagaaatacctgctaagataccttcttctttagccacacgacgtgatgtttccattgcagtttcattaccaactttaatgatactatcataaatattagtatttaaagtatcaggtacaaagccagcacctaaaccttgtaatttatgtggaccaggttctccaccacttaatacaggagatccttctggttcaattgctacaatttcaacgttaggatatttctcttttaagactttacctacaccagatagtgtaccgccagtaccaacacctgctaagaaagcatcaatttgtttgccttcaaattgttcaactaattcaggaccagttgttaatgcatgtacttcagggttagctggattttcaaattgttgaggttcgaaataaccatgttcttctttcaattctttagctttcttaatagcacctttcattgcttcagatccaggtgttaacactaattccgcaccatatgcttttaataagttgcgacgttcagaactcattgtttcaggcatagtaaatactgctttataacctttagctgcacaaacaaatgctaaaccaataccagtattaccacttgttggttctacaattgtatcaccaggtttaattttgccttctttttcagctttttcaatcattgctaaagcaatacggtcttttacagagccacctggattttgatactctaattttacatatacatctgccgcatcttcatctactacgtttcttaattttactaccggtgtgttgccaataatttgtgtaatattttctacaggtttttgtgccatcgaaaaaacgctcctttaactttctaatttaaaacttagtctttctatcggatataactatattctatcagaattttctaaaaagacaaatatatttctttaaatatgatgtaatattttactttcattagttacatttagtttttcccataaaaaaagagcaataaacatacgcttattgctcatcaacattctactattgttttattgtatcaagtagttcttgaagttcgccttcagaataatgatatttatttccacagaaatgacacacggcctcagcaccatgatcttctttaatcatatcttcaatttctgcttcacctaaacctttaattgcatttaggaatttttcatgactacaattacattcaaattgtgcatccattgtttccaaaatttgtacattctcttcacctaaaatttcatttaagataccttctggcgttaagccttgttcaatcaatttagaaacgggctgcatttggttaattgcattttctaatttagtaatagtttcttctttcgcacctggcatgacttgtataataaatccacccgctgccttaatagaattatcagggttaacaagcacccctaatcctactgatgacggtgtttgttcacttgtcgcaaaataataagtgaaatcttctccaagttcaccagaaacgattggacttgctcctgagaaataatctttcattcctacatccttaacgacttgaattgcaccctcagtacctactgctcgtcttacatccaatttaccttgatcattaagtggaaaatgggtttgaggatggtccacatatgcccgtacatttccttgtgcatctgcatcagcaataattcgaccaattgggcccttaccatctactgtgacagtaagcttttgatctccttttaacattgcccccattaataacgttgctgtcattgttctccccatcgctgctgaagctgtaggccatgtatagtgacgtgtttggccttcttgaactgattcagttgttaatgcagcatacgcacgtacttctccatcaaaagccaaagatttaacaatataatcatgtgtcattactctaatctctcctttatgttattttatttcgtttgtttcatttattttaaaatctaatattaaatcctttattaagaatatctattttacactgcttatttaagaatatgaagtaacttgctctagcgtatataatgctcctatatcatattaaaaactctttcgattaaggttatttaacccgagtcgaaagagtttttatgactaactatgattctctatgatttgaatctgttggatgctctatatttggagattgttcataacctgtttcatctctatcatttcgttgtgaatgattttgagattgattacggtctgaacgatgattgtttctatcatgatcgattctgtcaccttttttgcggtcttctgcttcatctttacgaccttcttcaagttgttcttcacgaatgtcatcataagatttaccatatttaccgtttgagaactcagaatcatctctatcttcatcttttaccactttagctgcatcataatccactgttggtaaaacaccatcatagaataatgaacgtatttgttctgctactagtgtttcttcagttaataatgttttagcaatcagtttcaattgagattcatgttctaataaaatttgtttacaacgttcatattgttctttaataatacgttgaacttctttatcaatttcataagcaatttggcctgaatagttaggttcaccttgcatatctttacctaagaagacttggccgccaccgcttgtagagaattgtaaaggtcctaatttcttactcataccatattcagtgaccattgaacgtgcaatttgtgttgctctttcaaagtcgtttgaagcaccagttgatacttcatggaagttaatatcttcagatacacgaccacctaaaagaccacaaattttatctaacaattctggttctgtcattaagaagcggtcttgtttaggtaacatcattgcgtaaccacctgcttgtccacgaggcacaatcgttactttgtgtacaacttctgcttcatcaagtaccataccaatgactgtatgacctgcttcatgatgtgctacaatattacgttctttatcagaaataacacgagattttttcgctggacccgcaatcactcggtctgttgcttcttcaatatcacgcatatcaattttatttttaccttcacgtgcggcaattaatgatgcttcgttcaataggttttctaaatcagcaccagagaaaccaggcgttctttgagaaatagcttttaaatcgacagtttcatcaagtggtttgtttttagcatggacatgaagaatcgcttcacggcctttaacatctggacgacctacttgaatttgtctatcaaaacgaccaggacgtaataatgcagggtctaaaatgtcaggacggtttgttgctgcaatcataatgataccttcattctcaccgaaaccatccatttcaactaataattggttaagcgtttgttcacgttcatcgtgcccgccaccaacacctgcaccacgttgacgaccaacagcatcaatttcgtctatgaaaataatacaaggtgcatttttcttagcattttcaaataaatcacgtactcgacttgcaccaacacctacaaacatttcaacaaaatcagaaccactgattgagaagaatggcgctccagcttcacctgcaacggcacgtgctaataatgttttacctgtacctggtgggcctacaagtaagacacctttagggattcttgaacccattttcttaaatttcttattatcttttaagaaatctacaatttcaattaactcttgtttttcttcgtctgccccagcaacatctgagaagcgaacacgacgtttttggttgtcgtacatttttgctttggatttaccaaagttcatcatacgacctccaccgccgccaccttgtgcttggctaaggaagaatataaataagaaagcaataattaatacaggaataagcgttgtcaacatactgacaaagacactttgtttttcttcttctttaactgtaaaatctaattctttttggctacgagcttcatttgttatttgttgtaaatctttttcgttattgtataaaatcgttgaagaataatcttcatcatttttagttttaccacttaccaagtacacattttgttcaggttggatttctaaagttttaagatcacctttatccaatttctctacaaactgtgaataggaaagttgtttcggtgtatttccattaccattgatatatgagaaaacaccgaatataataacgccaataattgcgataactagcacattgcgaaaagctttctgcatgcgtcatttcctcctatttctataataaagctaacaaagattgtaacataatctagcttataaaggctagtatttcaacttttgtagcgcttttctaattctagttaattattttatattcatcatttactcattctttatttctaactttacatatctatgtatagtcgtttcataaaatgacaattttgaatataaaatgagtctacactaatttatatcgttagtatagttattatatttaaaaatctatttaatgtatttgctaatacattataagattttatttattataaatttccggttttaatgtaccaatgtaaggaagatttcgataatgctcagcataatctaaaccatatcctactacaaactcatcaggtatttttttgccaacgtattttgcttcaatatccgctttacgacgattcggtttatctaacaatgtaacgatttctaatgagttaactttgcgtgatcgtagtaattcagtaattgattttaaagttgtacctgtttctaaaatatcttcaataatgagtacatctttgttttcaatagaagcacttaaatcttttaaaatttgtacttctcctgttgattctgtaccaccgtgataacttgaaacatccataaaatcaattgctaaatgtgtatcaatacgtttgattaaatctgccataaacataactgaacctttaaggataccaacacaaacaagtggtttatctttgtaatctctcgttaattgttcacctaaatgtttacaaatttcttggatttcttcttcagttaataaaatatcttttaaatcctctttcatttatgagtcatctccaatttttttaatatctattatatgtttaaagcttgtcgtcacataaagttgtcctatagcaatcactcgttgttttgcatctaaaatgatgggtatttgtgtacgttctatactatcaatttttttatcaatcaataaacgacttacttttttatgtccatgactaccatttaacttaaacttatctccatctctacgtgttcgaatcgttagaggccaatcgattgcttcattattctcatttggatgaattgtaattaaataatgaccaaattgatatgtataaggatgcgtaacaatttgttcttcaagtagagagtgttcataatgagccattattataaatttatcatatgcaatttgaattatccatttttcagtgaggggaattttaatttgagattgtttactctcaatttgctcgaaccattcattataatttttttctgaaaaagatttatttaactgaagcatctcaaataaacgatctaataaaatcatttttgaaatttcatctagttgattaaaagacgctcgagataattgtatacgttcttcattaaggtaaatgttaacatattgttctataaaacaacttattctttgttgtgtaagttgtaattgcatatcgtgccaatgtttcaactttaataattgttctaccttaaagtccttattttcatcaatagctggtaaaagccgattgcgaatgtcatttcttgcatatttattatggtgattagattcatcttcataaaaaggcacatggtgaatggtttgatactgttttatatcatttttatatgtctctatcagaggacgacaaataaagtaatgatttcgctcagtatattcatgcattcctaatgaattgcgcgttgatcgaccagtaaaaacgcgataaaaaatcgtttcaagttgatcatttaaatgatgagcagttaataaaacatcagcatttatcttgctcatcatttcatcaaaccattgataacgtaaatctctcgcttcagattgaatactttttcctttttctactgtttcagataaatctaactgtttaacataacagggaatttgatattgcttgcaaaattgtttaataaatcgttcttcttcgacagatgcatctcttaaaccatgattgacatgcaaacacgttatagattgatatgaatgtgataaatcatttaataatttatataataaacacatactatcaatacctgtagataccgcaacagctaaatgatccgtctttttccaaagagacgttttcactttcacattactgaacctcctgacttaggctaaataattgatataacgaaaaaagagtgagatagaactttaatttcagttctttatctcacccctggcatagatcttacatgatctaatgcacttaagttattatcaatacatattaatctagaataaatgattggaaccagggctccgttaacttagctatatttactcacacagatataattaacgtctagatcctttaccaccacgtcttgattctgtttgacgtttaatagaagtcaatttgtcttcactgtcttttaagaaattacttaatttcttttcaaaatcttctgctttttgttgaggtggtttattttgattagatttgtgatgtggacgacgaggacgatctttcgcttttttaattgagagactgattttaccatcctctgcaatagataaaacttttacctccacttcatctccaactgataaatgatcttctacattttcaacataattatcagcaacttcactaatatgaactaagccacttttaccttcaggtaattctacaaacgcaccaaattttttgatacctgtcactttaccttttagcttgtttcctacttcgattgacatattctaaataaatcctcccgataatgtttcaattttaaccttattatattcctgttttaaaatttacacaatgctataaaacgattattttaaattaagcgttttactttaatttttaaagttgagtactctttttaattattactagaggatttagaattagacgatgatttatcattaggcaatttaaaaataatttctccattgttacttaaataatagtcatctcgagcaactttctctatataatctttatcgttaagattattaagctcttcttttaatgctatttcctcatcttgttttttctgaaattgttcttctttctgctttcgttctattgttgcttgattgttactttgtttttggaagacaagcatgatagatagaataataataatcgctaataataatcctccaaaaactgttactcttcgacgaacaacacgcattcgtttttgttgccgttgtttctttcgatttcgttctgaagtatattgattatcaatatgttctacctttttactcataacttgtcacctcctttaaacgtttcaatcatagactacacttcttcagattgtgcagatggttgaactcgttcttctttaatcagttcatacatatttttagcattttcttttgatgcgtgttcacttaatccagttactttaaccgtcacacttttttgtccaaaacgaatgactaattcgtcttccacttttacatctgtgccagctttagctacattaccattaattgttacacgtccttgatcgctaatttctttcgcaagtgtacgacgttttacaagtcttgatacttttaaatatttatctaatctcatttatcattctccccttgttgtaaataatttttaagggtttcttcattaaaatccttatttttggttttatcatataatgtcataaaatggtctgcaaacactttctcaaatttcacacgaggtattttaccttcttttgcttttgcatccttccagacatcatttaaatcttctattgtttcaactgttttatctccgaatatgtgaggatgtcgacgaatcattttagcatttaagctttcaatcacttctttaatatccatatatccttcttttttaccaatactcgcatggagtagcacttgtaataagatatctccgagttcttcaatcatatgccaatcatcttcattatctattgcttcaaacaattcaaatgtttcttctaataaataacgtttaagtgattcatgcgtttgcacacgatcccatggacaacctttttcatcatccactagatggtcaataatataaactgcaaaatcaaaatcagtatacatatcttcatcacgcgttattttaggcacaaatacacttgttagattgttaaacatatcctcattatgatctaactcaaataacggtacttctaatactttagcgccttgactattagcgtccgtaactatcttcactttaaaatcgtctggataacgttccattaatgtgagtttaacatctgctgcaatcatcgcactatatacttgtgtaatgagagtatgtgttcgaatatttaatgtgttttctttcaaaatagtaccatctaataatgtaaatccatcattaggatcttcatcgattgcaacaaatatatcatctataaaactttttccacctaaaatctttacatgtatatcatcattatttttattgtaatcaagtaatttagcagtagtcgtttcagctacacgtggatgtccaggcactacgtaaacagtatcttgtatacgcgtttcttctattaaagtttcaacaatatgttgatacactgcttcaaattgatcatacttttcgtacacgtcatcaaagcttttaaattcaatgtcactttttaaatctttaataacaggatgttcgagtgtccttgcatatacactctgttgctgttttaaaaagcgatagacacctaaaggtaaatcatccatactatgattgcctatcccaacaatggtaagggtatgcgtcatatctatcttcctttctttatgcgatacagtttatcgccgaatggtaagtgttttaattctttatatcctaaaatattcatatacataacaagtaataggaatatgagaccccctattcctactataattaacaactcaattagactgcctaaacggcctacaggaggtaatagcattcgcaacccctgtatgactactgacattataatgagcgcactcatcaatttaacaataaacgcgcgcatgcgattaaaacgataatatttaacgacctcataatgtaaaatagtaacaaatattattagcgaaagcactgtgcttatacttgcgcctaaaatccccataaagtaaatgaaaatcacattaaagataatcttaaatagtagtcctgacatcacaccaataaaaataggtcgaatgtgattcatcacttgtaaaagtgcgatgtccatcatgataagcgatacaccaattatagtaagcgtataaatactaagcgtgaagcttaattggtctgttttgaaaaatacatggttcatcatcggtagtatattaataagacctatacctgctgctacactaatgagtagtgtaatttttaaagatgcatttgtataacgattcataagaacttgattatgatcagaaatggcatctgtaagtaatggaattaggacaaagctaaatgtagtagtcactattaaacctatttgaataaatgaagcgcctctatcatagattcctttttgcataatagcttctctaaatcctaaaccatatgtttgtagcatatgaacgactgtaaaactatctataaattgccataaaataactaataattgacttaatgcaaatacgagggtcgcaagtattagctgtttccaaggaataggatatgagtgctggtttaattgtaatcgaaaaggtcttgttgctaataaatatagactagaacctaaaaagccaagagctgaagctaatattgcaagtgctccagcttgataaatggtccactctttaaacataaacattaaaatagctatgataataacacacacacgaatacattgttctattacttgtgaaatagctgggatattcatttgttgtctactttgataaaaacctctaatcacacccagaattcctataaacaaatagctaagacttgccatttttaacattggtgctaaatgcgcatctcccattaatagtgctaatggatgggataatactaaaatcacactaaaaataataagacctatcatttgaaatcttagaagtgtttttgaaaatacttcagttccactgtgacttccaaatacttgagtgacagcactaggaattgcattcattgatagtatcatacctagcgctacaataggataaatttgttgatacgcatataatccagagtcacctaaaatattttgatatggaactcgataaattgcacttaatactttaacaatgactaaagcaagcgttaaaatcactacgccattaaatgctgaatgttgtcgtgaattcttagaagaagaggaaacttcagatgacgatttataattcgtactcaagttccatacttccttcaagacattttactaagaattttaagttgtctaaccactgtttggattttgttagagtaatatgcattttaccttctttaacacccaacttcattgttcgtcctaaaggttgggtttgtttaaataattcttcaccatttatctgttctgtacctttagttgaaaggaatacttcaatttgttttcctttatctttaatcaatgtcacgcctgcatgtaaagcgtgtattttaatctctaccatttctaataaacgttctacttctacaggataatcattgaagcgatcaagtaattcatctttcacatcaaaaagctgttcttcattttcaactttacgcaatttcttataaatttctattttagcttgttcattttgaatatactctgctggtaaataagcgtctaagtgtaattccatttcaacatctggtgcatcaggcgcttcttctgtaataccacgtttttcgtttaccgcttcttctaacatttgagaatacaaatcaaaacctactgaatcaatgaatccatgttgttgcttacctaataaattaccagctccacgtatatttaaatcacgcatggcaattttaaatcctgaacctaattcagtgaattctttaatcgcttgtaaacgttcttcagctgtttctgttaatactttattagcagaatgtaagaagtaagcatatccaatacgacttgaacgtcctactctaccacgtaattgataaagttgacttaaaccaaaacgatccgcttcttctatgattaatgtgttcgcattaggaacatcgacacctgtttctataatggttgttgtaactaaaatgtcgtactctccattaataaaactcaacatggtttcttccaaatctcgctctgtcatctgtccatgagcaacagcaatatttgcttctggcatcaacatttgtaactgttcacgcttttcataaatagactgtactttattgtaaaggtagaacacttgcccatcgcgagaaagttcacgttctaaagcctctttaataaaattactattttgctctaatacataggtttgtacagggaagcggttttctgggggcgtttcgatgacagataaatcacgtacgccaagcatgctcatatgcaatgttcttggaattggcgtagctgtaagtgtcaatacatctacatttgttttcaatgttttaatacgttctttatgacgtacgccaaaacgttgttcttcatcgacaataagtaatcccaaatctttatattgaatatctttactcaatagtttatgtgttccaacaacgatatcaacgtatccagatttcagaccttctttagtctctctaacttctttagcagtacggaatcgactaatcaactgaatttctactggaaaatcttgcatccgttcaattaatgtttcgtagtgctgttgcgctagaatcgttgtaggcactaaaaaggcaacttgcttgccttccatgacagctttaaaggccgcgcgtacagcaacttcagtttttccgtaacccacatctccacataacaagcgatccattggacgttctttttccatatcttctttaatttcttcaatagatttagcttggtctggtgtaagttcatatgggaagtccatttcgaaatcatgttgctcagccgtatcttcaccatattgataacctactgacatttctcgttctttgtatagtgcaataagttcatctgcgatatcttcaacactttgttgtactttggctttcgtttttttccattctgagccgcctagtttatttaatttaggcgatttatcttctgaagcaacatatttttgtacttgatccatttgatcaacaggtacaaaaagttgatcggttcctttatattgtaatttaatataatctctatggacgtctccaacttctagtgtttcaacacctaaataacgtcccacaccatggtgcacatggacaacatagtctccaacatttaaatcttgataagatttaattttttcagcattagaaattgttttagtccgttttcgttgttttttctgttttgttttaaataattctcgttccgtaattacaacaagttgcatataaggtagttcgaaaccttctgataggctaccttctgttacaattgcttgtccactttcaatctctgagtgaatatttgtaacagtaggaatatgcatttcattaagcatcgattgaatacgttcaactttcgtttcagtttctacaagtactacaatagtgtaattattgcttacataacgttgaaattctgaacgcataatgtcatattgtccataaaattgttgcactggcttacatgaaaatttaataatatgttgcaacttcactggcatagaggatgtgaataatgtgaaatatgtgactggataatgattgattaacgtttcaaacccatcatattccataaatgactgtccaataaacccgttaccactttcaattaaattctggataaaatcatctacttcagtagtcaatgtcttttcagtttctttaatacgattatattcatcaactactacaatggcatctttttggaaataatcgattagtgtagaaggtgtgtcatacataaaagcaactagacggcgaagtaattgatgatcaaagaaagtggattcaaataatttaaaactttcatatgtttctttcaaatcatttcgtacagatttatcaattttaggacgtgtttgttcatatgctttttgtaattctgtttgaagatgattaatcacatcttctgtaataatataatcactcgctgtagtgatatctaccttttcaacattatcatttgaacgttgtgtttctacatcaaagtctcgaatcgagtcgacttcagtgtcaaacaattcaattctaactggttgaccgataagggggtaaatatcaatgatgccgcctcgtagagaaaactcaccaatgtgagaaacaacactctcacgtcgatatcccatgtttactagtttatttaaaaattcatccacatcgatatcatcgccaacttctaaagtcatttgatgatgtttccacaattctactggagttaaccattttttcaaaccatttaaaggaacgataaataaccctttcttatcatgagataatgccgttaaagttctaacacgttcactcataagttgtgggctttgagttgaaaattcctctgtcataatatcttggactggatatttataaacttcagaatgatcaatgtattgcaatatatcagtttctaatttatctgcttgatataaattatttgtgattaatagcatttgcttatcatcattcaagtatttttcagcaataatggttgctttggctgagggagataaacctgtaactaaaatattttggttgccaaagacgtcgtcaagttcctggaatcgtttgtcattttgaatatagtcagaaataatcgttctcaattgacttctccattatattcattcataacatgatcgaaacgagacgtctcaataaatgcttccactgcttgtgcagcatgttcaattactttttccattgtcatcatttcttcattagaaaatttttgtaatacataatctggaactgacataccattcgttggtctccctactccaatacgaatacgtttaaattgatctgtacctaaatgtttaataatcgatttcattccattatgtccacctgcacttcctttttgacgtagacgaatatgcccttgagataaatccatatcatcgtataaaacgattaaatcttcaacttctacattatagtaatccattaaaggtcctacagcttctcctgataaattcatcatagtcattggctcgataaatagcactttatccccatttaaacgttcaatagtataagcgcctttgaatttttgtttatctaatgtaaattgatttttatctaaaatatagtcaatcacttcaaagccaatattgtgtcttgttcgttcaaaacgtttacctatattaccaagacccacaatacatttcatacgttgcaacctccattgtgttcatctttttgattgatttgaacatttaatttaatatgtgtcgattactccttattttataatattactcaatataatacaaaaagagagtaggaaagaaattcaatgatttcgtaacccactcttttataagttatcaaacttcaacttttattttaacattcattttttaaatgtccgatgtacataagaaaaagccttctacatatgaaaatgtatcaggctctttctatcaatttaattaaagacattctcacttaaagtgaatacatagtcatcaacgaattactcttcgtctttattttcttcgtcttctttgtcttctttgtcttcaccaactacttcaggttcttcagttgctgattcaccttccattgcttcaatttcttcttcagaaggttcatcagttggaggaactactgtaacaacagattcttctggatcgttttcaattgtgaaatcaccagatactttaatatccccaactgaatagctatcatttatttgtaaatcagtgatatctacttcaattgattctgggatattttctggagttgctgtaatttgtaaatcaaataatggttgttcaactacgccgccttctttagcgccaactgcttcaccaactaattgaactggtacatcaacagtacgttcttcagtcatgttaatagctaagaagtcgatatgagtaatttggtttttaagtggatcaaattgataatctgataccataactttaattgttttagaaccaacgcctaaatcaataacaccgttacgtccaacttcacggatgactttgatgaattcaacttcatctactttaactgaagtgtttttagtaccataaccataaacaacagcaggtactttacctgtattacgtaattttttaaggtcagaacgagtttgtttaccttgacgaatgattgactttaatgaagccattcgtatttccacctttcattttcaagttgaaacaataataatatattgtcttaacttctcctcacttgcccatcaatttaaacattgcttgcaagtgtttatttattcgttaaatcacgaacgaataaattatacatggttaaaaataataagtcaaattcatttgtaaattttagtcaaataatacacttactgactcacgttcatatacacgaacaatagcttgtgctattaaaccagctacagataattctttgatgtttgatggtttttgactatcgtcaagtaagattgaatttgtaacaataagttctttaatcgctgaattttcaatacgttcttttgcaggacctgagagtacaggatgtgtacaacaagcatatacatctttcgcacctttatcttttaatgcttgagcagctaaagtaattgttcctgccgtatcaataatgtcatcgataataatagctgtacgtccttcaatttcaccaacgatattcatcacttctgccacatttggtttaggacgacgtttatcaataatagcaatcggagtttttaaaatgtctgctaatttacgtgcgcgtgttaccccgccatgatcaggagatacaacaacacattcttctgggttgatgttaggattattttcaaaatattgtccaataatcggtacgcccattaagtgatcgattggaatatcgaagaaaccttgaatttgtggtgcatgtaagtctaaagcaatcatacgatttgcaccagcagtttcaattaaatttgctactaattttgcagtaattggttcacgactacgtgcttttctatcttggcgcgcataaccataataaggaacaacaatattaatatttgctgcagaggcacgtttacatgcgtcaatcataattaataattccattaaatgtaagttaactggataagatgtcggttgaatgataaatacatcacaaccacgaatactttcttcaatattaatttgaatttcaccgtcactgaagcgtttaacagaacatttccctaattcgattcctacacgatcagcaacctcttgtgctaatggttcatttccctttaaagaaaaaatctttaaagacgaatttttgtactcattatttaacatttatagtcctccaattttttacttagacaatactattatataaaaattatagcatttttactatattccactaaaaactgaccaataatatgtttattacgtatcattcaacttagcataatagtaatacattcaaaattttatatttatatattcatttattccctttaacagaaaaatgacacagtctttttgttcttatattaatctttattttttattgtaaccttctttggttacttgacgtgcacgtgctaatgctaagctttctttaggtatgtcatctgtaattgtcgatcctgctgcaattaaagcgccatctcctactgttacaggagcaatcaaattcgtgttacaaccaatgaaagcatcttttccaatgactgttttaaatttattgactccatcataattaacagtgattgaaccacaaccaatatttgtacgttcaccaacttccgcatcgccaatataacttaagtgtgatacttttgcaccatcttttaattctgctttcttaacttctacaaagttacccactttaacttcagtacctagatttgaaccaggtcttaattgagcaaacggaccaacttttgtcttatttcctacactagaatcattgatgactgattgtataatattaactttgttgccaatacgactgttgttaatttctgaatattggccaacgtgtgtatcttcaccgatgaatgtttttccattaatacgtacgcctggttcaataacagtatccatacctatctctacatctgaacctataaatgtagtattgggatcaatgattgtaacaccatttctcatatgatgatgattaatacggtgttgcaacgctttttcagcatgacttaacatgattcgatcatttacacccataatttcatcaaaatcatcagtatgatacacttctgttttgccattatcttctaaaattaaagtaacgacgtcgggtaaataatattcaccctgtgcattatcatttttaacttgtttaagtttttcgaataacgttttattatcaaatgcaaatatacctgagctgatttcattgatgtctttttgagcatttgttgcatctttttcttctacaatacgattaaggtgatgattttgatcacgtacgattcgcccatacccgaaaggcgtctgagctgtagccgataaaacagtgacttgtgcttgtgtttcttcatggtgtgcaattaaacgttgtaaagtttctgaagtaataagtggtgtatctccacataccactaatgttgtaccttcttgagtatgtaaatgttcttctgccattttaacagcatgtgcagttcctaattgttcattttgataactatataatgactgattacctaatgtatcttttacttgttctgctccgtgacctacaatagtgacgatttgatttacgcccgcttttttaacatttgtcagtacatgttcaaccattggtttaccagcaacctcatgtaacactttatatttctttgatttcattcgtgttccttttccagctgctaatatgattgcatttctttgcatgaataataatcctccaataaaatttgcacttcacaagtaattataatttaacttaacttatagtttcaagatttaacaaattttgtaaacagagtttaattatttgcatcatgcatctaatttttaaaaaatatcgataaaacaataaaaataggcacgaaacaaaattcaagtttgaatttagagtttcgtgcccacgtcatttagcttacataattaataaaataagcattatcaaaaatatgatttgcttttgttattttaagcttcgtctgattcttctgttacgtctgatgaagcatttttatctggaatcacttcgtcagtttcatcatatactttcatcacagcatcctgtatttcttgtctcatttctgaattgattggatgtgcgatatcgcggaattcaccatctggtgtacgtttgcttggcatagcaacgaaaagacctgagttgccttcgattacgcgtaaatcatgaattacaaaagcttcgtctaatgtgatagaaacgagtgctttcattctgccatctgtttgtatttttctaagtcttacatctgtcactttcatgcagtgagcccccctagtatatatatctttgtgtggttagaagcatgacaatgtgttaattaagtaaattatattcctttaactttacctactaattcaatttcaactttaacgtcttttggtaagcgagacacttctacgcaacttcgcgcaggttgatgctcattaaagtagctaccataaacttcattaatttgttgaaattcattcatatcagaaataaaaatggttgcttttacaacagagtttaaatcagaacctgcttcttcaagtacaacagataaattttctaatacttgttttgtttgttctttgacatcgctacttacgatgtttccttcagtatctaatggaatttgtcctgatgtgaatactaaattattcacgaccattgcatgagaatatggtcctaacgcttcaggtgctttattagtattaattgttttcatggtgtataactccttttaagaaaatttagacaagatattaccaggttcaactttaaattcttgattatattcgtcaacatctgataatttgactaaagaagtataatcctcaatcaatctttgttttacttcttttgattctactagtacagataccccttttacctctgctttaaactcattcataagattcattacaccatttattgaaccgcctgctctcataaagtcatctacaactaacacatttgagttttcggctaatgtgcgtttcgataagaccatcgtttcaatttttcttgatgagcctgaaacatagttaatggaaaccgtagaaccttcagtaactttattgtcttttctaataactactacaggtaaatttaatacgtttgctactgcattggcaagtgatatccctttcgttgcgatcgtcactactgcatctagtttctcatccatgtaaatactagcaatgagtttccctactttattaagtaatgatgggttcccaactaaatccgataaaaataaatatccacctggtaataagcgctctttttcttgtagcatcgtaatgatttcttctataatttcgattgcttcttctttgctcatcattggtttataggttacaccgccgcttgcgccagctgttgtaattacagttcctaatttttctttttggaacgtatttttgatgatttgaacgtcttcactaatcgatgactttgcttgtttaaattttttcacgaaaaaagttaatggaattaactgatttggatggttcattaaatattgtgtcataaagacaatacgttcacttcttttatacctcataagttccagcctttctatcctaataatcttactaaatacacttcgttacaacagccatttacagcattatatactttctttgcttggctctccttttgagcgaatgcatatacagtaggtccactcccactcattagtgctccatcagcaccacaacgcaacatattatttttaatttttttaatttctggatacatggacatagaaacggtttctaaacgattagataaactcttacacaatttcatataatccccctgtctaatcgcttcttcacacatttctgtatgtacatcataatcatctttcaaattaagttctttaaaaatatctggagaagatattccaagattaggttttgctaataccacccatgcagaaggaggcttgtctagaaatttaattttttcgcctcttccttcacatatagcagttttattatagatgcaaaatggaacatctgtcccaatttgaaggcctaattggcttagtgtttctaaagatgcgtctaattcatataaacgattaattcctcgcatcgtagcagcagcatcagctgatcccccagctaatccagcagaaaccggaatatctttatcaatcgaaatcgtgacgccttgtttaagttgatatgtttccatcatcagtttagctgcttggtaggcgagatttttatgatcattagtaacatagttatgttctatatctacaacaattttattatcatttcttttctgaaaagacaatctatcattcagatctactgttgtcattatcatagcaatttcatggtaaccatcatttcttttgaaaagtgtatcgagcgtcaaattaattttggctggtgccgtttcatatatcatttttccgccctctcttcatcaatagtattaaaatgattttaacataaagacttaaaatatttgatagttacattataaattataattaaaagttaataaattaggagataaatgatcttaatttcaactgcaaatcttgatttatttaaattattattttattaaaagtgattaagaactaaaaagagtgttgaacttaaacagcccaacacccaatatgtttttaatgatagagtttgtagtacactaaacaactctatatttatatgttcgaatttagtgtgcaactacttcttgatgattatcctcttcaaatgaaacttgtacgttctctgtaagaacatccgtatatgtatacgacactctttcaaaattatgcttatcttgatctaattcaacaataaatactgaaggatatgtctcttttaacactccacaacgttcgattgttttttttcgaccaccgttggctttaagtacaatacgatttcctaaatgacaatcaatagaatttttgatgtccaaaattgattttggcatattgctccacctcgctacaggttacataatatcacatttcgaagtaatatgtcaaataaaatttaaattttatcaaggtaatgacactttgtcaataatttaattttctaattctgggaaatttttcttttcttcatacaatcgtgcaaaatcttgtatagaaagggtttctccacgacgtttaggatcaatatttgcattttctaaccattgatgaatttgtgatttatattttttaccatctttaaagaaattctgataattattattaatcgttttacgtctttgagcaaaagcagcttttgcaagtttaaagaaagcttgttcatcatctactgaaacaagaggcttctctctttgcatcaattttacaacaatcgagtcaacatttggtggcggcataaacactgatttagggacagtgagtactttactcgtttctgtgtagtattgagtcacaatagataaagaaccatatgcttttgtacctacttctgcatttaaacgctctccaacttctttttgcatcatcactacataaccatcaatggggatatcttgttgcattaaattaagtaaaatcggagtcgtaatatagtagggtaaattcgctactaccataattttatcgcagtcatttaaatacatgttcacagcggtagctatatcagcttttaatatatcttcatttataattgttacattgtcatagggatgaagtgtttcttttaaaactggaattaaacgttgatcgatttcaaatgacaacacttttttagcacttttagcgagttgctcggttaatgatcccataccaggacccacttcaattatgcctgtcgacttatcaatataacttgcatcaataattttatgaataatattaacatctactaagaaattttgacctaagcttttcttaaaattaaagtcaaattgatttaatagttcttttgttctagaaggtgtagctatatcttttctatccatctttacttattctccttatccattgataatgcacgtcgtacgtcttcttcagtataaccaaaagcatttaatttttttagtaattgtttgccattagaatgtccaatatgcaatttacgtccaagtatttctctcttacgtctcgcatctttaccaataattaaacctaaatcaattaatacacttttatctatcgactcttctccttcttcaaaaggagaactcacatgcattaaggctgtctttatatcgtcaggatgtgtatgttctatcccaatttttccacgcttatttttcgctttttcacgatcgacataggcatgtttaactcccggtacgtgttcagtaataatatttctaattctatcacctggaaagtcaggatcagttaatacaatcacgcctcttgtttcttgagcattctgaatcactgccaacgtttctctattaatggcacttccatttgtttcaatcgtatcacatttcacagctgtcttaactcgttctgtgtcatctctgccttcgacaacgataaattcatttattctcatattcatttaccattacctttcatttaatctcatttctattataacggttatactataaaaaaaatgagaaagatgcacatattatcgtcactcactattagatagcattacgatagatgatgttttacatctttctcatactgaggattattaatttaaattaaataatctttctgcattttctgtagtttgacggcatacctcttcgtatgtcatattacgtaaatctgcaatttgttgtgcaacaagcgtgacacgttcaggttcattacgttttcctctataaggatgtggagataaataaggtgcatctgtttcaactaataaacgatccattggaacatgtttagcaacctctttaggctgttttgcatttttgaatgtgactggtccacctaatgaaacatagaaattaagtttattaataacgacatctgcaatttcaggtgatgcactaaaactatgcataatacctccaacttcttctgcatgttcttccattaaaatatctacacaatcttgagttgcttcacgattatgaatgacaataggtaacttaacgcgtttagctaaagcaatttgctttctaaacacttctttttgaacatcagctggagatttatcccaatgataatctaatcccatttctccaatactgataattttaggatgctgagctaatgattcaatccattctaaacgttcttcagtaaaatctattgcatctacaggatgccaaccgataataccataaataaaatcatattcatcaataagttccatagtacgttcaattgtcttagtatcaaatcctacgacaaacatacggtcaacgcccgcttctcttgcacgagatatcacttcacttaaatcttcatcatattgttcgtcatttaaatgaacatgtgtatctattaacattttatctctcctaacggctatatttattttataattgcaccatttggaattgcactcggtaagcttactaacgttaatactttatctttttcagctgataatatcataccttcagatttgtgccccattaatttggctggctttaggttagttacaacagccacttttttgccaataatatcttctgaacgatagaatttcgcaatacctgaaacaatctgacgttgttctgctcctaaatcaacttgtatttttaataatttatctgattttggtacattttctgcatcaataacagttgcagctttaatttcaactttatcaaaatctttaatatcaatttgcgatttacttggtacttcttctttatcatcttcactagatttagggggttgcattgattctttaataaatgcaatttcatcctctgaatctaatcttgggaagattggagaaggtttttcagtaaccataattggttcttgtaatgcaccataatgctctaaacttgataattcgtataaatctgaattattaatattcaattgtttaaaaatttctttaggcgcatgtgttaagaatggacgcaataatacagttgcaaaacgaatattttcaactaagtgtgccattacatttcctaacatatctttttgactttcatctttagctaaaacccatggagtggtttcatcgatgtatttatttgttcgacttattaacttccaaactgtagataatgctactgagaattggaaactttccatattgtcatggaaattcttcacagtttcaagtgctaatgcttccatatcttcatccaattcatgttttggtccttggtatgcagggagctctccttggaaatatttattaatcatagaaatcgtacggttaactaagttacctaaatcatttgctaagtcgaaattagtacgttcaacaaatgcctccggagtaaatactccgtcagatccgaatggtaattcacgcattaagtaatagcgtgtagcatctaagccataacgattaatgagaacattaggatctactacattacctttagatttactcatttttccatctttcattaaaatccatccgtgcgcgaatacttttttcggtaaaggtaaatcaagagccataagtaagataggccaaataatagaatggaaacgaacaatttcttttgccattaagtgtacatctgctggccaatatttttggaataatgaatcatcatctgataaatatccaagagaagaaatatagtttactaaagcatcaatccatacataaactacatgtttagggttagatggaactcttaccccccaatcaaatgacgtacgtgaaactgctaagtcttctaatcctggtttaataaagttattaatcatttcattttttctagatggaggttgaataaaatcaggattcgcatcgtaaaattctaataaacgatctgtatatttattaatattaaagaaataactttcttctttaactaattcaacttcatgtccagaatctggacttttaccgcctgcgattttaccattttcgtaaacagggtctacaagttgagattcagtataatacgtttcatcaggaacagaataccatccctcatattcaccaagataaatatcaccttgttttaataaacgttcaaatactttttctaccacttgtttatgacgttcttctgtagttctaataaaatcatcatttgagatttccaatttagcccataagcgtttgattccagcaatcatttcatctaaatactctaattctgtttttcctgctttttgcgctttttcttggattttctgaccatgttcgtctgtacctgtaaggtaacgaacatcatatccttgcatgcgtttatatcgtgcaattacatcaccagcaactgtagaatatgcgtgaccaatatgcagattaccactaggataataaataggggttgtaatataaaatgtttctttcgccatcagtagtcctccctttcgttcatgtcttaatgactagttcactttaaattttatctaaatttttaattattttctaatgaatgtttaatataacgtttgtcataaaacagctatcttattcattataacccatatagaatatacattgtcgtatcttattaacattaccataaattaatattttatggtatttttctatcactatgatgcaagattttatcaattttacgatttaatattatgataaatatcataaatctcacttgttttcatctgtcgttcttctgctactacttttattgctttcttaggttttaaattttgagtctcaatataatgattaacatgatctataatcgttacatcttcaaaccattgttttgtttcttgagctttggcaccctcaattaaaatcacaaattctcccttttgtggaatctcttgattttcaatcgcttctaataattgtgatacttcaagcataacaatttgttcaaattttttagtaagttcacgacctactgctacacgtctttttgaatctactttaataatcgcttttagggtatcaatcactctaaatggagactcatagataattaaagtactatcttgatacattcgttgagataaaatattcactttttccttttcttttcgtggcaagaagcctaaaaaagtatatgtaaatgaaggtaaaccacttgccattagtgcagttaatcctgcattaggtcctggaatggtttctacagcaatgttatgtttatgtgcttcaacaacaagttcatatcctggatcgctaattaacggcaaccctgcatctgatacaagcgcaatattattttcttctttaagtaattgaattaaataatctgtctgctgttctttattatgttcatgatatgattttaatagagtggtaatatcatagtggttacataactttttagttactctcgtatcttcacatgcaatgatatctacttgttttaatgtttcaattgctcgaaatgtaatgtcacctaaattacctataggtgtccctactaagtataaagttgccatattatccctcctcaatcaattttaattttttttgtcttgtaaatgtcttaatttcatattctctgcgtaaagcttctgattttgtgtcgtacatttcttgatatactaacactaccggacgtcttgtttttgtatatttagcacctttcccagcattgtgtttattgatacgtacctcaatattattagtatacccggtgtataaactgttatcactgcaacgtacgatatatacaaagtgattacccataataaacctctttcatttgctcactatattcgccattttcattataaatataaaatggtggtgcaatctctagaccttgattaccattttttcttccttcaacaacaatagtgactgctgatttaccatgcttactataaataaatacaatacgtttaggttcaatattaacttgtctcatttcagttaatacatccataagtcgttcagcacgatgaaccataactagacgtccaccctgttttaataaatgtcgtgctgcaaacatgcaatcttctaaactacacataatttcatgtcgtgctattttatgtgcttctttttggtgttgatgaagttgattctgtttaaagtaaggtgggttacaggttattaatgtaaactgagagggtttaaatgtttgatacacatcttttaaatccatattatgcatagataaacgctcttctaattgattatatttaaagcttcgttgagccatgtctgccaactgttcttggatttcaatactttctattttttgatgactttttgcagctaataataaagcaataataccatttccggcacacaagtctagaatgctatcattttttcgtactttagtaaaatgtgctaataaaagtgcatcagtagaaaaagaaaacacctcatcattttgaatgatctttaagttctccttaattaaatcatctaatctttcttgttccttcaacatatatgttatctcctaaaaaagagatgtatcacaacacaaaatctgaaattttattgtgttgaaattcatctctcctaaaaattaagattataccatccgcttatcattctccgttatggatttaactatttaaaacattcatgcataataaacaatcttcaccataacgatgtttaccaaataattcaccattacaaatatgaaaaccttcactatacaaaacagctaaattgtctttacttggtaaaggtttttttacatttttaattgcacttttaaagtcattttcatttgattttttattatgtggactttcactattggcttttgttgattcaacatcttgttcacttttagccattagcgcttttaaattatcgttctctacttgtaacgttacattttcttctatcaattgaatagctaaagatttaagttcagtcatctcttgagttaatacattaacgttactttctaattttacgattttttcgaataaatcattgcgattcaaaagaaagacactctccttaattaaatgtagctaattcctccattttatattctaaaggttgctctaaaccatcaatcttcacttgcatcgaaatatctaatatatttaatcctacaacttttccagtaccttccggtgtatgaatttcatcgcctacatctggtaattgtgcacgagcttcttcataataatcattttcatatttaagacaacacattaaacgtccacatgcaccagaaatcttagttggatttaatgataaattttgatcttttgccattttgatagataccggttgaaaatctcctaaaaatgttgaacaacataatgaacgtccacatggtccaattccacctagtagttttgcttcatcacgaacgccaatttgtctaagttcaatacgtgttcttaaattttgagctaatactttcactaactttctaaaatcgatacgatcatcagcagtaaaattaaaaatgactttcgatttatctaaagtatactcacaattcactaagcgcatatctaagtcttgatctttcactaactgtttacataaaattaatgcttgctctgcatctttttcattttgtttgtattgttgtatatcttcttcagttgcaatacgtagaatatcttttaacggtaatgtcacatcttcatcatttacacattttgaagtcaactttactatacctatttcaatgcctcgcttagattcaactacaacccaatcttcactatctaattttaaatcattcggtgcataatattccaatttacctgctttttgaaattgcacacctactacatttggcatttaactcacacctttaattacgatttgttcaaatacgagcatcggattcacattctgtatcaattttttatgtgcttctataatttgatcatacattaatatcatttgattaagtgttaatcgtgttgtgtattccttaatgagtggtttaagatcagtaaaaatgaaattatcctcaatcccgactttagcatgcatcatatcttcaaaaaaagcattgataacagacaaagtaagaagttgtagttttcgatttttagcattttttaacacatcaatcacactaatcaaggccattggtttatttgttaataataattcacaccaatgaacgattacttttcttaattcaattaaatcatactcttcattaaggtctttggctacctcaatttgtgtcgtatatgaacttaacatttcagcaatagcccgattaataccattatcgacaagtttatcgataaaatgcgatgtgtcacttggtttaaaatacatatgttgacatctagaatgaatcgtatttaatatttgttctggtttagtagaaattaaaattgcaatagtattttctggaggttcctctaaaaattttaagatactattttcaccttgaacagttaacttttcaaagtcctctatgatataaactttatatgtaccttcaataggtaattggttcatttggcgtacaagttgttcaatttgttctttttttatagtagattcttcagaggatatatatgtaaaatcaggatgattaaaattacgcaattttaattcacattgttcatttccattacaaagaataagttgtgcaaattccatcgctacatgtttcattgattgtgcatcatcaccttcaaataaataggcatgtgataatttattcgaatgaaaagcattagctaatttttgtaattcttccatatttgcatactccctattcatcgttcattttaaaattatatcattaaatttttcagtcgcatttatcattcagcaattaattataatgtatatgataaagagccgataacataaaaatatgtttcaggctctttgaaaattatcttttaaaactttatttaattttaaattaagtttagaatctgtggaatttttctactggcattacaaatactgtagcgcctccaacttcaacttcaacaggataaggtatgtaagagtctgcactaccacccattggcgtcattggtgaaacaagttgatctctattaccacacgtattatcaatgacggttaacgcttcatcaacacgttcatcatctacaccacataagaatgttgtatttcctgctcttaagaatccaccagttgttgctagtttagtagctctaaaattattttttacgagttggtctgaaagttcttgactatcttgatcttgaacgatcgctataatcattttcattttaatacacctctttatattattatatcataagttttttaagtaacttaaaatgatctcatacgtatcacttatgacgctttcgatgctttgtgtagcatcaactactttaaaacgctcaggattagttttaattaatattttatacccctcaattactttttgatgaaaagttagtgtttctttgtctaatcgattctgacttctttgattttttagtattcgttctctccccacttcagcatcaatatcaagataaattgttaagtctggataaagtccattaattgcaaattcatttatttttttaacttcttctatacctataccccgtgcatacccttgatatgctaaagaactgtcaatatatcgatcacataagactactttattattttttaaagcgggtatcactttttcaaccaaatgttctcttctagatgctgcaaataacaatgcttctgtacgtatatcaatattttcaccatctagtaagatattacgtatttcttcccccgtagatactccacctggttctcgagtagaaataacattataattttcagataacaacttattaatctgatttaacactgtagttttcccagaaccttcaggcccttcaaacgttataaatgcagccatattattcatccttaactaatattttatcgtttttaataccttcaacacgtacactatgtgaaagataatattgcatcaattttatcatatttttagtcactttttctcctttccaaaacacaggaattccaggaggataaggcacaatatgttgagctaatactttatgttgtgctttattaatatttatccaatatgcatgattaatatattttgatacataaacacttttctctagcggcaataaaaccggctctagcttttcttttgcttttttaggtaattgtatagtttttattctatgcagtaatgtttcgaaaggatatctatcattaaaatgccataatggtaagacaatgagtatttgataatcatcagctaattcaatataaatatgattcttttcaaaataacgttgtacttcaaaacccgtatgcccatttgctcgaacaataagctttaatggatcctcgacttcaataacttcaaattgctgttgtcttaacgtttcaataaattgttttcttttttcaaaaaagagactactgtcataggaattataaaattgatgcgctagttcaatgctcgacattaccaaataagatggactagaagtttgaaaaatacctaaatatttaataacttcatctttcaaaggtgcatttttatgaataaataatactgatcccatagtaagtgtaggcaaagttttgtgatacgattgaacaacatagtcagcttctgattctaaagctgatttaggaaagtgtttcaaattaaaatgggcaccatgagcctcatcaattaaaacgggtatattgtaatcgtgaaattgtttaacacactgattgatatcaaagcattctccataataatttggataagtaactacagcgagtttttgatgtcgtaacattttagtatctatcaaaggtgctaaatactggtaacttttatcacttctatacataggcaaaatatctgcagattgttgagttaaatctaaagcattaaaaactgatttatgtacattacggctaattaaataacgaccttttatatgagcaaatgcttgtataactgataaaatacctgcagttgtaccattaactaaataataagcatcataattgggatgcttattcacacgattcatactttctaaaatagtatcttctggatgatgtaaatcatctagacccgtaatttcagtcatatccattttcaaagataatgcatctaaataaccgatagtcatatttttatgtcctggaacatgtaatgagatagcatgatgacgaattaaatcatcaagtttttgagtgataggtaatttcaattaagtcctctcctcatataccttatatacctttaaatatctcctattttaatagataattcaaaaaaataaaagaaacgctaaaatttctgttgcttgatttcttctcgattcattagctccaaacactttctataaatttggacataaaaaaagagacctcacggtctcaatatcggctcatcgcatccatacaatgatttgcctggcaacgtcctactctagcggaacgtcagtccaactaccatcggctctaaggagcttaacttctgtgttcggcatgggaacaggtgtgacctccttgccattgtcaccagacaagtgaatgattatacattcaaaactagatagtaagtaaagatttgcgtcgcaaaacttgaaaaaattgattaagtcttcgatcgattagtattcgtcagctccacgtgtcaccacgcttccacctcatggattgccaatcacttcattcatcataggtaagctagtaatcatcaattgaacttctttgtcttttaaataattaacggtacgaatcacttcatcataattacgacctaaacgatcaattgattccacgataaaccgatcccccattctcacaaagttaagtgcttcttgaagtatcggtctattctcaatagatttcccagattgtttttctgtaaatattttttcagcaccaaacgtctttaaattttcaagttgcctttctaaattttgatcgattgatgatactctcacatagccaacaatcattgatttccacctcacaattaatatacaccctaatcatacgttctagtcactataaattcaataattacatatgtgtgattagggtgtaccctaaatttattatttgtttaacttctccacttttttataacatcagtcatgcttatttcttcagtcacatctaaagttttccatttctcactccatatttcatgaacccttacattagatgacttaggtttcggggttctgttgcaaagttaaattaatatacaaagttatgcaaaagcagtaaattgtatactattatatcaacagattattcggttggattttattatttttcatttctttgtatctatattatatgattttcaagtttgcaacagaaccagtatttctatacaaatacactcttctattataggtatcaaaattccaaatgttattattgcaataattaaattcgaatgatcaactagattgtttaaactttcctggttatttggtataggaaaaaaagtagttagtaaataagttgttatttcgataacacaagaaagcttattataattaaagttacttcattacgttttaaaggtttgaaagagaataaattaaatttaaatacattacataatcctagagttaatagcaaacaaattatcaccattatgtaaaataaagttttgtttgctcacttgctaagatagatatattttcattaatagtatacaagatagaataaaacagattttgtccctagtagatatctaagctaggagaagttgggcattttattaaaatcaaactcattgttattattttttaatagttgtttagacataagatcacttatcggaagttatctattatccctcattcagagatgatataatatacaggtcgcctatctctcaggcgtcaatttagacgcagagaggaggtgtataaagtgatgcttattttcgttcacatcatagcgccagtcatcagtggctgtgcaattgcgttttttactcattggcttaataaacgcaacaaataattaataggtgacatttagccacaccaacaaaaatcccctcactactcgcaatagtggggggattggtgtataagtgaatacttattttcgttatttaaataataacactgattagtagaggaatgcaaaaatactactgtttaaatatatatcaattatattgattattaatatctggaaaattcacttcaacttcttgtttaatattagtaatattatctttaaaatcagtaattttatggattatttgttcgacaatttctctttcaacagggttatgaagagtagctaatgcttcatcatttgggatttctatattctctgaagtagtatacatttcattcataataactaataaattatctctagaaaggtcagaaggagatattttattttgttcaacgataaattgggattttccattatttatttctaagattttcataagtttctcctttttttctgtaagtttcaattcctgattccatagcttctacaaacttattataactagactctgaaacgcctaaattattggatatagagtttgaagaaaattctccagtgagtactttataattattgttttgatctttagttgttactattaggtaatcaggattgattaacgctcctaatgtagaattatgagtaactacaaaaacagtactctctctggataaattgtttaatgccggtattaattcgtcacgaatataggcgttgtcaagcgaagcttcaggttcatcaataagaatgataggtttatttttagattcttcgagtctcatcattaatgcaaaaccaactgcttggcctccagaagcaggggttccatctgaatctaataattcaacagttaaatttataaaataatttgctaaatcagatgttttataaaattttttcttttttaagttatttaaaaaagtgatgtaatcactttgtagatatggttttataatttcatcattcacagcttctctggtggatgcgacactttgaaattgtgaagcgttctcgaaaggagatattttaacaatgatttgatacccataaacgttttctcttttaagctcttgttcacaaattatgtttttcataaaagtatttatttgtttttccatctgctgcttttgaattatttcagagaattcacaatctaatactgttgtaactcctgttcttgattggactaattttttaacagattctagtatttcattaactctttctttaattttattttcttgttgcttttcaatatataagattctgagttcattatatgtttcgataaatacttgtttcttttcatttggatttttcaataaggaccaaaattcattactttgaataagactttttaaatctgttaaatatttttctaaattagcagtaggtattttatcaaactttgattctttatgtagtagatatttttcttttgaattacttaaattattatctttagcaaaatttttaacactttctaaatacttttcaaccacgccatcaaattcattttcatctctgtttaaatactctattattgtccgaaattgagattcatattttcttttccaaatatcaaatgcaaattgtccttgttcttttctttgtttttctatatactcgtctgctctagctgtttcgaattgagcaatttcatagtattcatcatcatcatattgcttttttatattttttaaaaattctgtttttccagttccccttttaccaactattaaattcatacctgtggaaaccatatgattattaatttctataacatctcttaaatttttttcgttaatatggatcgcttttttattctttatacaatttttgatttcagaaaatgtacaattatcaatttgtaaaaaagtatttttcatttttaataaatgaatgttttttcttttgggctcggggtcatcatctgcagcatgtgcatcactaaacaaaagaggtattaacatattttcttgattgtaaatagactggaattttaattgatttgctaccccaccagctattgtaatagaagaatttgataatttttcaggtactgacaatgaattactttttcccatttcaaaaatatatatgccattctcccaatttaccatgttattacaaaaatcttcggtacttatcgtgtctcttatttctaattcatttttagataaccagttagagaagttaacaaggttttcaatgtcctcttctgaaaatataatatttacatgtccttcttctaagcttaattcaatgccaggaaaaactgtaatatcgggtagatcttcttttacttttttaaaattttctaaatcaaataagtcatgattagtaattgctatagcatctaattcagcttcttcaacatatcttttaatccaatcagaagaatatgtaaaatcataatctttattactagatacggtatgaatatgaaaatcaatacgtttaaccatgtgtttccaccttttaaattattgaatgtatacatataaaaataataacatattttaagttaaaaaatttatttattttacactttacttttttggattaacggaaaactttcaagtacttttaatttacgtataatgaaactatattgataaaaaggattgtatattaattatgaggtggaaagcaatgatttttggctatgcgagagtatcttctgtcgatcaaaatttaaaaagacaactcaaaaatttaaaaacgtttggtattaaaaaatatttatagaaaaatagtctgggaaatttatcgaaaatagatcattacttcaagaagcacttaattttgtgagaatggaaggagtagaattaattgattgtttaggtcgtaattacgatgaagtgattggtaatccatcattagataaatttatgaaagatctaatcattcaaatattagcaatggtttcagaacaagaacgaaatgaaagtaaacgtcgctaagcacaaggtattaaagttgcgaaaggaaaagatgtgtataaaggacgccctttattatattcaactaatgcgaaagatcctcaaaaatgtattatttatcatcgagttgtagaaatgttagaagaagatcaagcaattagtaaaattgcaaaagaaatgaatataaaaaggcaaactttttataaaatcaaacacaataatgatttggtttaataaactttattttgatgcaaatgagagcttctcacagcgtttcaaaacaattgataattaatctattaggaacttttcaagaaaagatagcgtaaatatgttctttctctatattcttctactcattaaaattcgttattggaatactatttttcagtactgaaatcaacataataattagattatctatagaatttgttaccaatctgctaaaaacttatataaatataaagtgagaagtaacgtacgtttttcataaatttattaaatttttctatactaatcataatatagaaactataattattagcaatgtgcgaaattaattcatataataataattgacttcaacaaaaactaggctacttatatcctgtaagatacagagaattagcagcctagaacatagtttttttattaaatttccattttaagggttcagtgacttcattaacttgccatgttttttattatacaattagttaccaaataaacgactccaaaatccctttttaggtggttctattttcttattatcatcagtactactcttcgtttcttcaacgaacttatcctcttttgttaattcatactcacttgtactgtcatcctttttctcttcagctatattcttatgatttacttttgttgttgattgatattttgaggttcttcagtaaaatttacttcttgataattaatattctgtctatcattctgtcgctgaatcaaaagaataattaagctgtctttcttcttataattggctttttagtttttgaatctttttattactttctaatgctaaaacttattggttttctagaaatctgaaatcactacagtttaaattttaataatgaagctttaaagtttcaactactagaagaatcacctcaaagtattcaagctatttatgtaacttttctgtagctaaaattagtaaatctatattattaaatactaaagcattttctaacaattatattgatacgtatttcttattagaagataatgaaatacttcatgtacttaaacgttttaaagtcatgcaaggatatctcatgaaatctctcaaatctgaattcgcagaagcacatacttaaattaattatttaattaaatttttatatgcaaccaaattacctaatctttaaattacgtactcctgtaaaaataaatattattgatattataataagtaacattatacctactattatatcatttgaactttcaaatcccatagatgaatctataatatctaaaccaactctataactcaaagtggtaggtatcaaattagaaaatggtgctggtataagaatcagagataccatcgtaatacctatagttataactaatgagacaatataattattgaatatagtaactagagtaatagatagaggtattaggaaagttgttaagagtaagttaaggactgtaaaactaataataatcattactaaagattcagacaaaccgtcaaaaataaaatagaataataataataaaattaaatttaataaatagagaaaagtacaatataaaaaagatactaaaaattttgaaaaaaacaatttatacttatttttggaataagaaagccagtttaataaagtatggtttttaaattctatatagaatatagatgatccaataatacctatagctataggtgttatcatgaaatattgattataaaatctaaaataaaaaccatcaattaacgataaatctttattattaataaaaaaattagcaatattcataataaaaggtagtaaacttaataaaaaaacaattattataaatctttcacttctaattttaataatttcattttttataaaagttatcattttaaataagcctcctctaccttcatactcataatttttaaatatacttcttctaaagtcatttttttagcattattgtaatatttaactagctcattataatctcctaaaatataaaaacggccactactttttataattgaatattcattattaattttaaaatccaaattatttgtcctatcatttatttccacaagactataatgtcttttattatttctcaaatgagctatcagctttccattttgaataaaaataaaaacatcagtaaactctgataattctcttaaaatatgactagaaactatagtaacccttttttcgtttttaatttcactaattattatatctcttatatcttttattcccataggatctaaaccgtttgaaggttcatctaataatattaagttagaattaccaattaatgttttagctatacctaatctttgtttcattcccattgataaatttttaaattttttatttcttgcactatttaaatttactattgataataatttatctatatgtaatgtattaataccaagatacctagcatgtaatattaaattttcttcacatgttagattggcataaaaagcagggtaatcaattaagtgaccaatgtttttatttttttggaactctatctttccagaataatcaattacttctaagatagatttaaataatgttgtttttccggcaccatttggtcctaaaagtccataaacggtattttctataaatttataatttatgtctttaagaatattattatttttcaaattaactgatagactgtcaatcttcaacatagcaaataccaccttcttctatatttctaatcttaaaacattaggaatatcatcattcattaaatatatcaatccataggaaataccagacaaacctgttaataaatctatactttgaatatcttctcctactccacattttagatctttagcattaaaatttttaagtatatcaaatattatattccccattttttcacttgttggtaatatatcttttaatatcatcgcattacctaagtctccatgacacaagcaatgggttctagaaaaaccttcttcaaatattttttcaatgattttttttctatcattacttgtataattactcttttctctatttaacataatacctggagacccatgacaccatgcataaggaggtcttgcctcttgactatacggatgaggccaataatgttcaatgcgataagtctcttcatattgattagctagagaaataatattttcaatatttttatcatatttaaaattattgatatataaactcaaggcataggttataccagatactccatgagcaaagccaacagttacatcatcttcactgtcttgccaattaattaaattattattggttttatgcattttattgagtaaagtgtttactgataactcaatagcttcttcaatagtatttttgtaatctaagttatttactatatgatataaattaatcaaaattactagtactccagaaagaccgctgataaagtcagtatcattttcgactgaaattttccctttggataaatttatatatttaattgcagtatgtatatatttttcctttttagtctttttatacacaactgcgcataaatatatataagaatatatgccgtcataggctccaattggatagtctgtatagtattgaatttcttcctcaatttgtaatattaaattctcaacttttaaaagatattttttgtcttgtgtatgttgataaagagcccaataatataaagccataccacataaacctttatataaatttatttccattacttctctttcaacagttctagttccaggagtaccatataattcctttgtcatccaactatatgtattatttatttcaatttgctcttctaaaataatctcttctatagaacaaattagagagttgaatttttcttctttttcactagtagtatagtttttaacattgttataatttttaattgaatgcaacgtcatatgaggtatgaatgagctattatcttctcttaaagaatctgaaataatagaaatttgccatttcatatcgctctcattcaatttactaattttataagaaacactttcttttaatggataataaaaaaagttttcaattactttagtttcattaaataaatttttagatatcccattgtaatagaaataaggaatattcatatctattaagttatttatttcatatttagacaacctatcaaaatcgttatatagataataagcaataaataactttctcagagttatactctgaagtattaaaggatggaaacttaaattgagtatacgtgcatactgcattgttgcattattaatatatctaacattaacgtcatttatattattttcaattaaactataaaactcatttttattatattctataaaattatagcaatctttaaatccattaattaaattaactttatagtttttttcgttaacaaactcctcattaattttaggatgattttggtttgaagataacttaatataatctgattcaactctcatattagaagatcgtacattttttatagttggaacttttaaagaggaaagtccttcttttccacctaacccgctaaaatctgctccttcattattaccgaaaataaagggaagaatacccgtagtttttacagatgaagataataaatagtgattaaaataagtagcatctttaaaagaatttttactaagtttgtttcctatcacgctttctaaatccactaaaatcgggtgctcttgcgaggctatgagattttctgagtggaaatcagtagcacctaatacatatagcaagaacaaatgcatgcctaattcatagtaaaaattttcaatttgagtaatatcattacactctttataatctacttcattaacccaaaaataattctttttaactattatttccgtttttttaaggttacaattcaaggatttattaatataatctagtattttattataaagttgatctattttaccatttctcggtttgaaatagaatgatttatgtgtatatatacatttgattaccgattcaccttgattgtgagtatcacccaatcctaaactaatatttagtaaataatcttcattactatcaattaattctttttcatcttttaacaataattcaaaaaaattattgatatatttatctatttgtctaatattagcttccaaaaaaagtataagattataatatttattaataaattctaatctatagtttttttgactaagtctatttatatattcattaaattgttcctcttctgtagaagatttcaattggccttggcttctatttaaatttaaatcataaactattgttctatatgaaatcctcattaaattttcagaaatctgagacaaaatatccgaatttaacttattagctttattttcatcaatgttagacaatttttgtaatgcttttaaataatctaattttgaagatttaacaataaaaagcattaagtcttcaaaattatctatagaaaagttgaaatcatacttttcaaaatcaatcttattattattattattattattattaatttcttgattgattttcatctttaaatcttcaaattcagtatcaaaaattttttttgctactttctctaaattattagaatctaaatctttgaatattctggggattaaactattaatattcatcatttttccacctctaatattatgaaagactaggaattaaatttcctagtcttttgattattaaataaaaattagcaccaacaagttttagtaggacatatagaacattcccaagtaattgtacaatgtttcccatcattccctgttttttgagagaaagatttttttctaatttccgattcaccatataaatggatatttaggtcaccatcttttaattcttgtattaaatcaccggctgtattaaataattctaaatctttattactcatttttttcctccagactttgaaaaaattttataattgtgataaattttaaattgtagtgtacattttcatttatattttataagttttttcaaaaaaactcaatagctaggaggcactttattgaaacaaaatagtagaattactttagatgaattaaacaaaattactatgggaacttcagaggtaagaaaaggaaaaggaggcggttttagtaccgtaaccgttgtaacaccaattgtaccgacatcgaagtgtgcctcaattgtaaaaccatgtaacaaataacttttaggagatgagtaaaatgactaaaataactaaagatgatttgaaaaagattacagaaaatcgtattgaagcacgtacacatccaaccgttgttcctgtaagtgctgctgtatgcggagttgctactaaattagtaccaacatcgaaatgtgcttcaattgtaaaaccatgtaataaataattattaaaaatgcccccctttaatagggggtttttgggtgataaaatggactacttaataaaaaaaatatatgaagataattccgaaatatttgaatactttttaaacaacatctattcatcttataacgattttataaccatcgattttataaataatataaaaaaaaataactttttatattttaaaaatgtaataaaaagatatctagttgttaattttcaagatacatataaaaactctattaaagagagtgattctaatttatatttaaataaatatatgaaagagttcaatttaaatgaccatcatactttaaaagaaaacatgttatataaaatgaatttatatcataaatttatttttactattatcaaaaatgcttataatgatagaaaactattagttgaagataaaggcttaatagataatattaaagttgattttggagattctcacaatggagggcaaacagtagctatagtatattttgaaaatattaaatggatttacaagcctaaaaacttaaaaaaagataaattatatttttcatgcttaaaagtaataaatgataatttaaatgttaaatatagagaacctaaaataatacttcgtgataattatagttggcagtcttttattgaacatttaccttgtaaaaatgaggtaatgataaataattattattattctttgggaatacaagcgtgtcttttatttattttaaatgctaatgatatgcattttgaaaatctaattgctaatggagaatatccagtatttatagatttagaaactttattacaaactgatatagatttttcaaactctaatttagagcattatccttcaaatgataatgttttaaacaccttattgtttgatgtttctgataattcttcggttatggatcatattggcggatttactaatcgtaaaggcatgcccatttatgatattacaatgtttaataaagataatgatcaaatttctattgttgaaagtagcgagatatatactaaaagtacacctaatatcccattgaatgctaaaaaagagccagtagaaatttatgaaaaaaaagaaattttcttagagggatttaaaaatagctacaagactattcaaaataattttcataactttttaaatactttgaataaatatgaaaatctagagacaagaattgtattaagacctactactgtttatgcaaattatatagaatatttcaagcaaatggaaaatgaaagtgataacgaaatattagatattttatataatagtattccgttttataaaaagagtaagaaaatagcagaatatgaaattaatagtcttaaaaattttgatattccttactttaaagtaggattaaaatcaaaaaaacttacttcagtagatgataatttatatattaatgaattttttaaaaaaacaccttatgaaaaattagaacaaaaactttctcatttacataatgaagatttaaacagacaactctatttactgaaattgtctattgacgcatatagagagctgaatgattcaaaaaataatgaatgtcctaataaaagagaagtggacactactattcaacatgaaatagaacttattgagaagtatctagatactcaagatactgtttttaacatagagttaaatattgaaggaaaaacagctgtaacacctatttcttataatttatattttggtttaagtggggtatccctactatacttgcaatatcaaaaaactgctaataactatttttatagttcggttttcaatggtttatatgattcaatatatacaatgtggaaattagataaatcgattaactactctatatatcatggacgattttcttattttaagtatgtatatctattaaataactttttcaattttcaaatagatataaatattgaactacaaaaaactttaaaagactatatatcttatatcgaagataataaaagttatactatagattatttaggtggtttgagcggtattatctccttattattagatttttacaaaagtaacgataatcattcatatttaaaaaaagatattattttcttaacaaaaaagcttatagaaaatatttctataaaaaataatgaaatcgtagtgaagagcgatataactaatggttcaatgaaagctggtttggcacatggaacatccggaataatatttgcattagcaaaatatcaaactgaatttcatgatgacaaattaagtgatataatagaaagaatgataagtatagaaaataatgaattagctttgatcaaaaacaatgcttggtgtaatggcctgtctggaattgttctttcacgaaatattattcagaattatggaattagtaacgaattattaaatattgtatcgttaaaatctcagttattaaatggttttccaataggagtagaatcagtatgtcatggttctagtggtaattctttaattttgaaaactatgaatatcaacaaaaataaccaacatatactgtcttatgaatggacatccgggtatttattccccaatgaaaacataagcttcttcatgggtatatctggccaattgtttaatttactaaccacttcaaaagataaagatttaattgaaaaattattaatttaatagaaggtaggatggatgtgctaattcttactaaaaataacacagaaataaaaaattgtgtatatacaataacatgtaataataaaaaaacttatttagagtgcatacaattttctttaagaaataaattaagaatactttgtaaaataaatgaaatatatacatttcaaatttttggaattattccaagaaattataatatttatttaaaaagagctggagctgttatatccacatcttttaagaaaatacaaccactatcttcctctaaaaattatgtcgatgaatatactaatccaaaaaaaattcaatgggatgtcattagaacaacaaataattatgaatctcatagaaaagctaaaggaagccactcccatagtgttggaataatagactctgggattgatattaatcaccaggatttagtagataatattttatctatcagaaactttgttcctcaccaatttcctaatcaagatggtgagtttaaagtggatcctctttatatgaaagactatttagatcatggtacgcaagtagctggtcaaatatgtgcaaatggtgaaataactagtattgctcctaatactggtataaaaatatatagggtttttggagaaagagaaggttataatatttggattatagatgcaattattcacgctgcaaatgatggagtagacgttataaatttaagtttaggaagttatttgctagatggtgattacaaaaaaaaaggggagtggaataataataattctgaaattattgcctttaaaaaagctattacttatgcataccaaaaaggatgtgtagttgtaggttcattaggaaatgacagtataaatattgacgatcaaaagattttagcttcagaaatcgtaaataaaaaagacatttctgatatacaaaaaaaatctcaaatatatgattttccttgccagatacctaatgtatttggagttgctgccgcaaattattttgataaaatctcttcttactctaataaaagtaatttaaatttagatatacttagttatgctggcgattatagcttacttgaaaaatatggaagaaaggaatggttaaacaaaaaatatattactaaagattggatattaagtacatctagtgaaactgtttatacatatacaaccggaaactccttagctactgcaaaagtttcagcagctatagctgcaatgaatgattattataatattgaaaagcagccttcaaaaagtatatctttaataaaaagtaaatctaataaaattcttaatatgtctaatctagtttcgtctgatttaagataaaggagtatcaatatgtataataattatctacattttctatttactaagattaaaatccctaaaatgcagttattcatatcaatactaatatctactttaggcgctcttagtggtttaatgatacctttatttgctggaaaatttatagattctttttccttaaaaacaattaataaagatatgattatatacttattaatattatttatagttaacggtattttaatgggtttggggaattactttatgggtgtagtaggtgaaaaaataaattattccattaaaacagtattctttgataaaataattagactaaaattgccatttttcgatcaaaatgatactgggcaacttataagtaggatggttgatgacacatctataattaatgattttttatctaataaattacctactatttttccttctgttcttactttcgtaggggccatatttttcttattagttatagattggcaaatgacagttatttctttacttacaatgctaacttttattttatttattgttcctataggaagaatagttcataacatttcattgaaaacacagaatgaaattgctaactttagtactttattaaataaaatatttactgaaattagattggtaaaaacttctaatacagagcgtaaagaaacaaaaaatgctaatacaattttaaataatttatatagcttaggtgttaaagaagttattgttgaatcaataataaatcctatatctagtcttattatgttgcttacaattggtatcatattaagtgttggagggattcgtgtatctttaggcatcattacttctggtgaacttatagctatgattttttacgttttccaattatctaatccaataaatgaaatacttactttttttactgattataaaaaaactagcggagcaagtaatcgtatttatgaaatattccaagaagaagaagaagatatttacaattccttagaacataaaactttagataataatagtttgacatttgaaaatgtttcattcacttataataatgtttctattttaaataatattagttttaatatacctaagaatcaacttacagctattgtaggtccttcaggttctggaaaaactacgattttgaatattattgaaagattatatcctatacaatctggaaatatttattatggtaataaatctatatttgagataccactaagtacttggagacgaaatataggatatgtaatgcaagacaaccctatgatgaataaaagtattaaatacaatttattgtatagtacaccgaagtctttaactaatcatgaaatcataaattatactaagatgacagatagttatgatttcattataaacactatcaatggatttgatactattattggagagcgtggcattaaattatctggtggacaacgtcaaaggttagatttaacacgtaatttaattaaaaatcctcctctatttttattcgatgaagcaacatcaaacttagatagtgaaagtgaacagaaaatacaaaatgctatcgataatttgaatggaaaaaaaacgatagtaattgttgctcatagattatctacaatcaaaaaagcacatcaaattatttttgttgaaaataataaaattaccggtattggaacacataaaaaattattagaaaaacatgataagtatcgtatgtttgtaaatacacaaaatttatccaatttaaattcttaaatatggtatcataatattgaggtgatttaatgaaatttttagaattattaggtacactatttggtataggtatagtagttttccctttgtctgctttaggttttttaatatttgaattcaccaagcctgttgattctagatcatttttagtgtcagtattttgtatagctttatttgtaatttgtggctttggtttagtaattgttgctaatattatagaatgacttatatataatcaaaataataaaagcaagttctattgagatgatatagaacttgcttttattattttgattagcagctgtaggtatcttaaatcaagattgaagaagaaagagaaattgtaaaaaaattcaaactgttcaaaacttttaatcaatttatctttattgcgtaaactctcgatatcttcaaataaagcataatatatattggaatattttgagatactattttcaatttttttactgatatttttattaaatgaaaatacttgtttaagtacctaggaaacaaaatcaaagattctgaaaatatgtttaattgtagccgaataaatgatattataaaaacatacaaaaaaaagcaactactggaatagttgctcagtctaaagtggtagtagtcacttcaaacgcttcaattaggataagacaaaacaatgtctttttttattatgttgtaattacattatatatgtagtaagcaataacttcaagtataaaatacctaatgaaaaaagtgtctattacctcttgctaaaattaattaaatttaggaaagaggtttttattatgtcaattattaaaaatatcaatagtgagaaaccatttgaagttttacctagagaattattacaacaatgtgataaaaaacgtagtaatacagaaaataaacctttatcattacaagcaataggtttgttatgtaatttacaaagttacccagaaaattgggaaattcacaaaacagaattatataatcgctatgaaaaaaatggtcgtcgtcaaatacaaaatgcttggaatgaactcgttgacgcaaagtatattattcaatttaaaatacataacggtaataaattggattattattattactttagtgttactccaataactaacgaacaaataaaaaatttagaagaatatcataatagcgaaagtttagaaagatttgatttgaaagtaaaaactcctactgtacaaaatgaacagtgcagtcataacggactttctcctactgtacaaaatgaacagtgcagtcataacggactttctcctactgtacaaaatgaacagttcaaaatgaacagttcagaagtgaacagttcaaaacgtacagataatataatacacaataaatataatacacataaatataatacacataaatataatacacactacattacaaaaaacagtagtagtagttacaatatattgattgataaaattaaaaatgaattagttattaatattactccagcatataaaaatgaattagtgaaattattctcatattttgatgatgagattattaattatgctattgaatatgcgtctattaatggatctagtccaaaacaatttttattgaaagttttaactaactggaaaaatgctaatattacaactttagaacaagcacaaaatttcaaagtaagtagtaaaaaaaataacattgtccaattttctaaagagaaaacacctaaatggttacataataaaacagataaaaatacaagtgaagaattatctgaagaagaaaaggctaagtttgaagaagatagaaaagcatttagaaaagcattagaagaagactggaaagaataaaaagaaattgagatatttgtgttccaaatttatttattaaaatcttattatattattctattaccttgctttaaagattacatttaaaaacatgattatataggaaattggaagaataattaaacaacttttactgtatactatgactaggagtgtgattttatgaaatttttagaaatattaggaactatattaggtatcggtatagtggtttttccattatcagcattaggttttttaattacagagttcacaaaacctgctaaagagagaacatttaaaaaaactgttttttgcataggtctaatggtgatttgtggatttggattagttatcatcgctaatatattagattaaacaaaaaataaaaagccgatgtatcggttttttttagtgttcatgtgaatattaaaaaattgtggagtgatgacacatgaacacattcgttttcggcgtgattttaaagagattagaagaaaaaggacttaatatacacgaagtattcaatatgagcgataaacaggctaaaaaagacttatttgatgatttataccactatgtccgctatacaaagccatgtggtgcagaattaacgatggtggcattaaatgctgatgaattgatgcattactttgtatgctgttatatggaacgttatgcttacaaattgaacgcttaaccgttacgacattttgcaaatgtcgttgaactcaaaaaagaggtgactgcaggttctgttgcaaagttaaattaatatacaaagttatgcaaaagcagtaaattatatactattgtatcaacagattattcggttggattttattatttttcatttctttgtatctatattatatgattttcaagtttgcaacagaaccaactagatcgtcttggacgtacaacgaaacaattaattgagttatctcaatggttcgatgaaaacagcattgatttatatattgtcgatatgaacatatcaactaaagatgcgatgggtaaaatgttctttacaatgatgagtgcatttgccgaacttgaagctaacttattaagtgaacgaactaaaaaaggactagaagcagcaagagcaagaggccgaaaaggtggaagtccttcattacctgattataagaaaagagaaattaaatttttatacgatgagcagaagctcacaggtgaagaaattgctaaaaaaacaggagtaagccgttcaacgatatatagagtgataaaatagttttcgtataatgaagtgtagctactaagattgggagaggttctatggaaaatagtttaattattaatgatgatattaaagaggcatggcaaaatgttaaatttgatatagaagaattcaagtatgattcttctaaactcaaagatttaataaccagttattgtgggtcatgtttaggagctacgtatgcggcagatttagacaaagaatataaaaaaaacacaataaattattacagaatatatactttactaactagaattttaaattggtataaagataatttacacaaaattcaatcaaacgattttgtttatcatcctgaagaacatctcgaattcaaaaataaaatagaaaatttattatatcctatagaaaatttcatattacccaaaggtatgaacaatagagaaacaaatcagtatttttttgaacttaacgaatcgttatcagaagattataaggaggaagtcatggaggaatcagatttaaaatcaccatctttttttattagtcataaccaattagattcagaacaagcacaaaaaattgtcgtttttttaaaaagtttaggaatctctaaagaaagaatattttgttcttcagttgaaagtacaggaatcccaggagatgcagatattaatgactatataaaaacccaattaaatgataactgcttttttatatttttattaagtcataattactttaatagcttatattgcttaaatgaaatgggagcagcatggattaatattgaagaatcaaaacaacttgtattttcacttgatgatagcgtcgtcaactttatcaatcgtactgttttaaaatctactaaaaacagacttaatatagatagaaaaggattcacttctttaaagaccgttttagttaaaaatgagatagtagatgagttatcatcctcagattttgaagaaaagttagaaactataaatatttcttgagatgttacttaaaatattctttttctgcaatatcaattttgcattcttctccactatgatgttataatacctttaacgaagattatatgcatatatgcaccaatcccctcactatttgcggtagtgaggggattttttgatgcggcttaacgtcgccttctatttattgcgtttactactaagccagtaagtaaaatacgcaactgcacagccactaatgactggtgcaatgatgtgaacgaagatcataagcatattaagcacctccttccgtcaaaaataccgccggaagttaaggcgactctattattatatcatctgtaaacacgtaagcatatccacttccgataagtcattttatgttatatctttgcttatttttatagtatcaagacaagaagaaactcgtttcactcgtttcaaaaacccttctgatttttagagaaaaactctcttatttcatcgtccttaataaaataatatgccatctttccatctttataaaaatcaagcacctcatttttatataaaagtcttaaatgatgtgaagttgaagcaatactcattttcaatatcaaagaaatatcacaaacacacaactcatcttctttaatcaaagataatataattttcaattttttctcatcacaaattttttctaaaatgttaagtaatttcttagatttatcatcttctaaaaaacttaaagcattgttaactttatcctcatgtacacagatcacatcacaagcattttcataactcatatgaaatcacaccctaaattaaaatataaatcctaaaattgtttgaatagtgtcattttctataatgataaataaacctaaagctatataaataacagccataatccaacgaccaaatttctcaacaatttctccaactcctggaatattagctaatttttgtgcagtaaataccaagaagaaaattaaaattaaaaagacaaacaaagtaattaataaattagtaacacttaatgtcacaaaatagggaacaaataaaccgatattatcagcaccacaacttgctatcgtaacaattgcaatcgtaccaactaatttagacaatcctttttcattcaattcttttttagctctctcttctccgtcactatcaccataaatagccactttaattcctaaataaatcggtattaaccctaacaatcctaatatccatttttcaggaacataatttaagacaaaggcaaagaataaacttatgacaatcaatgctacagatcctacatattgaccaatataaatatctcgatattctttcctagtctttgctctagcaaagaacattaataaaatcactaataagtctaatgctgtcgcaatataaagaatagcagcagttacaatagtctgaatcataattacacctcattcaaaaatatttttgaatgtattataacttatttttttaaataatcatagttgctttattccaattgctttattgacgttgagcctcggaacccttaacaaatccaaaacttgtagacacaatggttattgatttacaggtccaaaattcatcgttataatctagttaaatcccgtaagggcgcacttatacgtcggataaatcgacgtgtgcaaaatcgtaatcgaccttcgtcgatttttttatttcaaaattaaagaaacggcttgagatattccgaacagttataaaaattaatttgtcttgaatattgctactacattcttgaaaaagtgatgtagatttatagcccataacttttttgaattccatcgacgatacggcgtcgaaagaaaaaagctatctcaattttagggtagcttttattttttatgcccttattttgaattttaaggggggcattttaaagaattagggataaatcatatagttttatatcaaaaacttatatacgctcttaaaacacaaatatgagccaaataaatatattttaatttcacaaataaaaatttgagcaaaaccagtgacgttttttagacattgcccagttatatgcaaattaaaaattgacataaaatggctcaaaaattcatcaacttttttagttcctgcaggggcagtttctttcaaaaaaacaccaaattttgaattggctccaaattctttgtaagagcataagggaaatttgctatcattttttatttttgtacccaagtatttttaacatatttttaacaaaaaaacgctacctttttgctaacgtttaagaaaatttgtttttatttttcttcttcaatttcatcaatcacttgatgattaatttcttgtttttcactttctgttaaatcaaaaaggtcactcgttaaatactcttttttattccaaatgtaaaaatatattgtcaaatcaccttcttttagaaaatgcaatttggcatgtttttcgttctattttatttctttagacagtctaaaataaataatactttgcttttcaattaacattttatagttaattaaaataattttgagtataatcatatcaatgaatcttattaaacactttatatttttttaattctctagttaataaaaaaataaaatgatctttatttcgattcacttttcaataaaattgagcatagaaaagtatagaaattgttttattctttctctttttttgaacttaaaaataaataatatgatcattattggatttgatattgagaaaaacgtatttaatcaatttcaaaaagtgaaacaaatgtatgaattgcttagattacttttttagtgattttgttgttgaaattaatactaaaagtaggagtcttaagagtctttggttaaaaaaattaagactcttaagagtctcgacgtcgactgaagcctatgaaatcaacaaaaaaaagagttttcagacaattaaaagtggtcttgtaataattgtaaagagtctgtaataaagtatcatattacacccttcgattcaacgcataagaatacttataattacctttatataaagcttttaagctatttatggtgaacaattgagctgaacgaataaaaggtaaatctttcagctatgctgaataccaccgaagatggtactggatttccttatgctcatgtcaaatactctttaagaagactcttatgtttgtaatatttccaaaaacaaaacatgtttgaagacaaaagtggctatttttttcttcactttttactttaagtgcttattttgaaaataaaaataagcattgttagtaaaatgattgaagataaaaaaaagaaaactaagtaaaactatttacttagtttgagatagaaaaaattcaaatttaaaattacattcaacccatgtcttgaacattaacgacttactttttgtttatgatgtatatcaattgaatctgaattttgattttttggaataataaattcaacctttttttccaatctttaacaaaataaatagcaaaaacgattttattaagtcacttttataactacaaaagattgctaaagaatataaaaacggttagtatttttataatttttaaagttaaaacaacgttaaatgatcattttatttttcatcttatgcgacatgtttgagccattttcaaacgaataataaccgtttatagaaaaaataggactaaaacagaaatgttttagtcccacctacttgcttaactacagttcattttcagatttactcaattgccattgaagataaagttcgactgcagttaaaagaacattaatcattgccaaagtaactttaatctttttcttagtactcataagtcttcctcctttctttaatagcagcatgctatattgtgatattgtgttgatcttattttgttatcccctcccttacctttcgtttgatctaggtggttgccttagcaaccacttgttaataaaaaaagagaacatctatttaaagatgctctctaattgaatcattattgattaaataaagaagtgatggataaatgatcgcgtcgcttattaagtgtatgcatttcagcgaattcagacttaagagatttcataagatatccttgcatggcttcaacagtttcatttttttgaataagcatggctttaaactgtttaagaacatgaagtatttcgatttccatatcttctaataagtaatatgtatcaatagaattattaaaagacgttttggcttttaataatacaggtttgatgattttaatttcatttacagaaaagttatttaaatacctttgaatactttgaggtagttcttcgagtaattgaaactttaaagcttcatcattaaattttgaattatagtgatttgtatgattactaggatatgttaatttcttatcattcaaatcatacgtatcattataatcagtatcattagtgtatttttttgatacatcatgatgtatcattctaatatttcctgatgtatcattatcatatttctggatgtatgaatttgatacatccgtagaatattgctattctacgtcattttcttgttgtgaaatacaataaacatcagcttttgttacttctggtttttttagatacaatttatttggtttatttaatcccactctgacttgactaaacaaatcggctcgagttaattctttctttattttagataatttatttgggctactaatatttaggattttttttaacttttcgttagtatatataaagaatatatccccattttcatctatccaattattttttatagacaaatctaaacgatctcttaatattgaccaagttatttttgcatcattagataatttagtatatttaggatttgtaaagaatactttaggtaatcgatagaatttttctttttggatttctttaatattaaaattagacatacaaaaacctctttcgtatttaaatttttaaaagaggtaataaaaaagtgataagtaagtatatatgtattagacttgcactaataaatcttaatatatataatatgaatacaacaattatacaaaaacatcttttttattaccgtagaagcctaactattcccgtagttgggcttctttctatttataataacatttttcaaatcattcttacattatatatacattaaatatatatataatgtatatataatgtaagaatgataaaagactatataatatctttatatggtattataggattttatataaagaaagctataataatacgtataacaggtatataacaagtatataaagataataaaaagaatgtgtataattatatgtatagcttttattttcaagaataaaaccttaaatatagtaagtataataactatataacgtataataaatactatatatagttatacggaggctattatatgaaaagtatgaaaaaaattgctgacgaacttaatgtgacaaagatgacagtttataacaatgctaaaaaggcaaatgtgaaatttcaaaaaatcgataacgtaaattacttatctagtgaagatgaaattatagtagtaaatagaattaaaaaaaataaaaaaaagattattgatactgaaagtaaaacagatgaaaaaaattatgataataatgattcagtcaaagatgaaacaataaagcaattatatattcagctagatatatataagaaacaggcaaatagagataaagaacaaataaatacacttaatagacttctagaaaaccaacaagttttagcattagaaagtaataaaaagattcaaaaactagaaagtcaattagaagaagaaagacagcttaattattcttttgatacagcagcgaatactagacaaaatattaattcgcaagaagcaacttttactgaagaatctcaaaatattaaccaacaacaaaggaaaagccaaccaatagaaaaagaaataaatcataaggatgtatccgaagagaaaaagaatgacaatacaaacgaaggtgaatttacaaaagaggataagttcgttgaagaaacgaagagtgatcctaatgataataggaaggtagaaccacctaaaaagggattttggagtcgattcttcggtaattaaaaatgaatgtaaaaggtgtatcaagggtttgtaaatctttgatacaccttttatagtgaaggaatttctgataatcagcaattatattaactaaacaaaaaggtaaaagtactgatataacagtatttgtatctttttgtctagattataagttttcatttattctcattgacgtacattttgtatctttatttagtcttacatgtataaaaaacgagcaatttaattcgtctattttttttagacttttatgataattttgtatacctgtacatactttcaaagttaattttacagtataaatttaacaaaaaagagcattcttcatgaattattttttaaatttttttaaaaaatataaatgaacattgtatattactactgcgcttattaacataattattgtataaagtatcgtacctaaaatatcatggtgtttgataaaacttattttttgtaacaatgcggctactataaagatcattataatgttaattacataaaaggtagtattaatggttacttttttatttttcttcattaaaaaaactcctatttctcaaataagtgatcagaataataaagtaaaatcgttagttgttatttgattaatcttatctgtattagctatattaaaacgaatattctcattttgtatctttattctgttaataaaataaacaacaaatgtcctaaaataactaagataatagttattaaaataatactgattgttgctattatttttattgttcttctactaaagtcagtattagtataaaccgaaaaatagaacattaccaagtatccaacgaacatgccatacatagataataaaaaattccattcaatatccatatatcctccacgcattaaagcataaattcctataattataaaaaataaaataagttggtatataaaagttatcatttatctattagcctcttacattggtattatattcttggattggtagcaatctttgggtaatgttctgaactaatagaggagattggaaacttaaagaacaattaaaaaagttataatatggtaatactagaggtgtgatgacatgagtataaataaaaaaatatatcttctttgtttcatattgtcttttgttatttatatttttctgcctgttattattggtcaaaatctttttattactcgtctattcgttatttttcctttattattcttaggtgcatttttattttcttcgaacaaaaaaagttagcaacaagggtagttgatttttttactatccctcaattttaatagaaagataaaaaatggataataattagttttatagtgacggaacttctgataatcataatttatgttaaattatatgtactataagatttagggataatataaaaaaaggagagcaaaggcttttattatcagcattcgtcccccttttttgtaactaacataatttttggtaaataattgtataattaatattattcaattattttctttttccaaatgcgcctctcataaatcctttatatgcttcaataatacctcttcctacattcatcattacactccccttttttatatgaaaatcaccatttcatatataatccaaatgtagaataacattataattaaaaaaaaatcaattttatattataatgataaatttaacttaattgtgttttacattaaatcgacaaaagatatattatatttattagataatgcttctgctttaaaaatgatctgttttaattcttctttttttattgttactatcttatctttagcataatcatttataatatatccaattttaggggttgcttttataatttctagtttctctaaaagctgataagctgattgtatagtaataatacttacatcaaatatttcggctgactttctgattgaaggaagctttttagttttataattttcttcatagatgttttgtattaaaatttctgatatatttaaatacatagatttattttcacaattaattaaacatttcataataatcctactttcatttttaatttttaacatatcattttttatactaatttataataaggagagtacaatggaaataaaagatgttactaagaaatacaaagataacaaagtattagataatttaagtttctcatttgattctagtcatatagttggattaattggtaaaaatggtgttggaaaaaccactattatgaaaataatgaatggtaatattgtaaattttgatggaaaagttatttctaataaaaaacaaaatattggatatttaattgaacaccctaaactatatcaagacttatcaggaatgaaaaacttaaaaagttttagtaatatattaggggtacaatttgataaagactatgctaataaaattataaaagcctttgatatggcaggttatattaacaaaaaggttaaaaaatattctttaggaatgaaacaaaagctagcaattgccgtctcgttaataaataagcctcagtatttaatacttgatgaacctactaatggaatggatccagatggttcaatagatgtattaaatactattaaaaatataactaatgaatttaacatgagagttttaatatctagtcataaattagaagatatagaattaatatgtgatagagctgtatttttacgggatggaaagtttgttaaagatgttgatatgacaaatacatcttcacaagaatatacatccatactatttaatgaaaatgatttggaaaaagctaaacatcatttaagtttaaagtcatatggttcaataaatcaaaatggaaatactttgataattccaaagcttaatacttaccaaaatatattaaaagatttagctaatattaatatattcccaattaaaattgaagataaaataagtactcttagagatacttattttaatattaataaaggagaataaacaatgagtatatatcatttaacaaaatttaatatatcaagattggtaaaaaatcctttcaattatattggtttactttttgttttaataatacctgtattttatacattgactcaggttcataataatcataaagtctctggagaaactattttaactctttcaacatggctattcgcattctggggagttatgattattactagctttttagtcagagacttttctcaaggtacatcacaattgtatttgaacagtttaaaaaacagagtgaagtattttatatctcaactaatctcaattttaatttctagtgttatagtatttttaatattatatgcatttgttttgataatgcaaagtgtaggtaatggtaaaactatagaaaatgaattagttggaaaagcgttaggaatatatatcttattatttctattttatggtttgtttctatttcttattactttattagtgagaagctcttctttggttttctctattggagtttttcttatattaataatacctatagcaacgaatttagttccattaattccagaatatggcgacgaagttagaaaagctttgaagtatataccgtttaattttttaatcaataatgtttggcttggatctcttaaaataaatggatggcaaacatttatttcaatagcttctatagtaatattagctataattgatttcttcactatttctaaaagagattattaaaaatttaacaaagtagttaaatcaaaaaaggattttgaagattcctttacgtgattaaattacggttataaaatcagaaaataataaaatatcttctctttgaaaaatgttaaaggtatgtttaaccaaataaattttcagcaattatttaccttatttaaactttcttgaaaggaattttaaagttcatattagaatatatagtactatattgtgggaaagattggcgaaaataaatgaggttgggacataattcttagcaaaatagccagtaaatgagttttttataaattcatttactggcttctttatttactgtataaagaaaaccatgcgctatgcgtatggttcagaaaaggttttaccgttatctaaaaaaacatctcatcatgctagaatatatattggtcagccaaccaaaatattcaacacgagaagatgctttttaatgtcatctaacataaacagtttagcacatacaaaatggaattgtaagtgtcacatagtctttgtaccaaaatatagaagacaagtgatatatggaaaaatcaaaagagatattggagttattttacgtcaactatgtgaaagacaaggcgtagaaataatagaagcagaagcatgtaaagatcatattcatatgttagttagtattctacctaaattaggagtatcctcatttgttggatatttaaaaggtaaaagcagtttaatgatttttgatagacatgctaatttaaaatatagatatggaaatagaaagttttggtgtaaagaattttatgtagatacagtaggtagaaataaaaagataattgaaaattacattcgtaattaattacaagaggatatcgttgctgatcaaatttcaatgaaagaatacctagatccctttacaggagaagaaattaaaaaaagacgaaaaaaattagtatccctttaggggtgctagaaaagtagtacagttggctgccctatcagtgcccttttagggctggccagtaagaaaggcttatagacgtagaacaaaccacccgttcacacgggtggttttgatttttatcctggaattttatgtcccggacttatttattttccaaatgcaccttttataaaagctttagttgctttgtaaatacctctttgtatattcatcattacaccacctttttatatgaaaactaacatttcatacatttaatataaatgtatactaacattattatttaaaaaaatcaattttatattatatgtaaattgtttctgaaagagattagtaatctaatttttttcaagaatgcatctcttcaaaaataatagttttttaagatgagataattatatattataaaactatcatggatattataaaagtaaataaaacagaaagaatgaatgataatagaaaaattgtaatgattttttctttatacgatacattttttaacgctactaatacacataagctaaagagtatgaagcttaatgcgaaataaataccaaattgaataaaaataaaattaaacggattacttattgttttaattgactcttccatattatgacctttctacatttaaatgatttatatgtattcgattttagaaaattaatattatagtaaaataacaagtacagaaattttgatgtaatttttattataaaggtgtttctattttaaataaaatattttattataataacattgaaaaaactatatattaatattatgatgttgctgaagatgtattttgagtaagattcattatgcatggtcttaaagagtttgttaatggtactactggaaaaactcttctaaatttttgatactatcataaaattttcttaggaagtgtataaaatatctattacgatacttcctaattctttataacattcaaggagatatattaatttgaaaaatgggaatccactatttaatattttgaaaaaaatcagtataccaaaaaaaataattttatatgctctaataatatctgcacttggtagtattataggtttgttagttccttggtttactggagaatttgtagataaattgaatgaaaacttatataactataaatttttgcttataatattttttgtttttctattaaacgctgttgtaagtggcttaggtttgtatttattaagtaaatttggggaaaaaataattttttcaattagacaattagtttggaatcatattgtttatattaatgtctctttttttgataaaaacgaaagtggacaattaataagcagaattatagatgataccaaagttattaataattttatatctcaaaaatttcccaacgcttttccggattttttaactattattggctcactcataatgctatttgtactagattggaagatgacaataagcacttttattattattcctatgtttttgttatttttaattccgttaggtcaaattactgaaaaaatttctaataaaaagcaaaatgagatagcactttttagtggaatgattggtagaatattatcagaaataagattagttaaaatttctaacactgagaataaagaatctttaaaaggaaaataccatttaagaaaaatatatgatttaggcatcaaacaagctaaaatttcagccgttatcgaaccgatatctagtattttaattttattgatgattgctttagttcttggttttggtagttggagagtttcgaacggatatataacttcaggaaatttagtagctatgattttttacgtttttcaactaattgttccagtaaccaatctttccactctactcacagactataagcaagcaaagggtgccagttaccgtatctttaatattattaatgaggatatagagagaatagataatggaaatgatgaaacacctaagtcgttttctttaaaatttgataatgtttctttcgcatatggttataaaaatgtgataaataatttgaatcttgatataccagaaaataaagtgactgcatttgtaggaccttcaggatcagggaaaagtactatattatatttaatatcgagaatgtacgaagtaactgaagggagtatctatgtcggagaaaacccattaaacaatttaaatttatcaaaatggagaaataaaattgggtatgttatgcaagaaaattttatgatgaatggtactataaaagaaaatattttatatggagttccagagaaaacgataaatgaaaaagatttgatttattatgctaaaaaagcaaattgctatgattttattaccaatctagaggatggtttcaatactattgttggtgaaagaggcattaaattatctggaggtcaaaaacaaagaattagtattgcaagaagtcttattaaaaatccgaggttacttcttttagatgaaattacagctaacttggatagtgaaagtgaaaagaaaattcaggatgcaatgacaagtttaatgcaaaatagaacaactataattattgcacatagattatccacaattcaaaaagctgatcagattgtttttttagataatgggaatattacaggaattggaagacataaagatttatataataatcatcaaaaatatagggattttgtaatgaatcaacaggtataattttatatatgtgatattttttacttaaggtaatttggaatgactataggaaaatagtatattggaaatcactatacttaacaaaatatgtaaccctaacaaagggtaattgaaaacttctgtcaaattgaaaaaagataagaacacttttgtaattattatagcaattataaattgtataatgattacaaaagatttttctattttttttctagatttaaatattataaaagatattggtaggataactatgatagttatatatgatagtattcccatttcacctataataccgctatcatcttttaataaagagaaaaaaggaatgttagtggaaattctaattacaaacatatatacgagagtataaatgtaaaaagtatatatgaaaaattagaaaaagtagataaatacaaagtaaaaaaactatataaatatctaaataatactatcctaaattatactagtagattaactgatattagtttaaaagatgttaatgttacatcgaatgatgaaattttagatagtcttatacatttacatcataataggcttatagggataaatagagataatgaaattaaatatttaactttgtttagacataaactatattcgcaaaatgaacgtgctaaatttcttaaagaaaggtagtttatatatgaaaaatgaagaagtttcactaataattgatcaatcacttcataaaattgtatcgaatttctctaatccagatgctctatctgaatatatagctaaaaatagttctactactagtcatcttaacccaactttatctgacggaattcctggatttctatttttattcagtgaattccctacatattttaatgatgaatttattcacagttatatgaaaaaattaaataactttataaataatgggtatattacatcattatctctatggactgggttgagcggagtggccttttctataaaacttcttgtagaatcttctaacggaaattactcaaattttttaaattctttaaataatttaatattagataatatagattcttatatcattgattttagaaaaaaacttgagagaaaagatatcacatctttagactttgatagtatttttggactttcaggaataactagatatttattagaattaaacgaagatcaatattgtcaaattgatgattcaattaaagaaatactaaaattattagttgatttaagctatatggaaattaacaataaaccaatatctaaagaaagatataataaaaatgctacggaatatctcttaaaaaaaacaaagcatggctatctagatacaggtttagcacatggcttatgtggccccttatctatactatccatagctctggaacatggttatgaggtcccctatcaaaaagatgcaattaaatacttaattgcgtctttaaaaaaaatagaaagttttgatgaaaacaaattatataattgggatggtaaaatagaaagatttcaaaaaattaattatagagttcctgctatgtatgggtggtgctatggattacctggtattgcgaggagtatatggattggtgctaaagcaattaattcagatgaatataagctttatgctctgtcattattaaaacaattgacttctatctccatagaaaaattaaaaatcaattctccgcatttttgtcacggatactctggggttttaattatatattatttaatgtatctagatacgaaagagaaagactttaaaaatttttacactaaaattcttcataaaattctagaattttatgagggtgataactatttaagtttctttaactatgactatgaaaataataaaaatttaaatattgggctactagaaggaacaagcggaataatactttcacttaatagtgtagagacactctctaacccacagtggtccaagaccttcttattatcttagtaaaaggttagaggtttttatatggatactataaaaaaatggcaatggaatattgctaaattaacccgagatttcaaaagttacactatagaatctaaatctcatgtagcaactgttgcaataattgatagtggaatagactgttatcatcctgatttaaagaataatatattgaatcttggtaaatcttttatatctcatgacccttctcttttagattttactggtcacggcacattgattgctggtgtaataacatctacaggtttatctaaaggtatttcaaataatattaaaatagctccttacaaagttttagattctaatggtggtgattctaaaaacattattgaggctataaaacaagctgttattgatggtcacaaagtaattaatataagttctggaacttatttatcatcaagtatcgaaagtgataaaagtttaataaaggggtacaaagaagctgttaacttcgcactaagtaaaaatacaataattgtcgcatcatctggtaaccattattcatctgaatataccaaaaacaacatatactactatccagcttgtctaaaaggagttattagtgtaggagcattagacaaagaaaacaaagtaacagaatactcaaagaacaatatctcaacagatttatatgctccaggaggcagctggggacctgattattataaaaatggatgtatagattatagatacttaatattatctacatttcctacgtacttgagtacatacttagctcctaaaaacagtttacctagtgggtatgaatttagtctaggttccagcttggctgcagcacaaatatccgcaactgtatctttgttaattgatcaatattatgccattcaccaagattacccaactcaatcctatgtaaaaaggattttaattgaatcttcaagtaatactttaatagtaaacacctttgattgcttaaagtatttaagaaaattaaacggactgtaaatatgcttagatatcatttattaattacttttcaaagactctatttaaattaactaaatactattgagaatacattactattctcaatagtattattttagtcaatgaacatcattcaagataattctttatctgttttgattctgtacactgtttgtcttgtaatattaaccgttttagcaattttactaattgcttgaccttcttctaacatttctacaaccctatgataaataatacgtttttgaggatttttcgcattggcagaatataataaaggacggcctttatatacgcctttttctttcgcaactttaataccttgtgcttgtctacgtttactttcatttcgttcttgttctgaaaccattgctaatatttgaatgattagatctttcataaatttatctaataatggattgccaatcacttcattcatcataggtaagctagtaatcatcaattgaacttctttgtcttttaaataattaacggtacgaatcacttcatcataattacgacctaaacgatcaattgattctcttcagattaatatggatgatgtttatactattggcgatagaaaattgatttacctatgtttaataccctagataattcttctgataatttagtttttgttagagtttaacataactgatgattataggaagtgattttgtataattcattcactttaataaaaaattaaataaacttttatataattaatctactaattatatagtgctatggtataattatcaataattaggaggtgaacaacatgaattcacttatgaaattattcactttaaatgaagtgaatatttggatctttaaaatcggtagaaaaggtaaaaaatggtacttctaattctttaaaacattaagtatcaaaaagctaaaataaaaaatattttagctttttgatacttatattatcggagttaatatgaaaagattcgaaagtttattattatctattgctttagtattaattgtaggcgtatttttcaatctaggtctattatttatgtcttttttaaataacaacactttttctattatttatttgtttctttttgtcattatttttataatttcttttattattattcctatatctttaataaatcgtattcaaggaataaagataaaatttattatgcaaaatgtttttaactggaaaagaacaataatattatttccaataattttgctattatcttttgttttagttggaaaagatgcaactacagagtatttcattgtggcctttggtgaagaatttttattccgtcacttaatcttaattatattaatgcattctttcagtaaaaattggagtataattattggttctcttttgtttgctataattttacatttgaacggaaattttttaataaacctattaacgaaatttccttttagtatcttgctatattatttatctaataaatataaattacaagacgctattgctttccactggctatataatattttagtctataggtttatttaatcacggaggttattaatcaatgaacataaactataaaagtgttttgttttcactaattttaaacattatattttccatatttatggctattataaatatcaatttaggtttaattataatgatattaggaatacttattgtacctatactaataaatgttatatctattaaacttagtaaaaaaccgtataatatattaacaatttttattatgagcatttttaatattatatattacattatatctgccaaatctatattacataatcctaaatttttccaattagcctcaaaatattctcatgaagaaaatggattttatattcatatgaacactaatttattatcattttctcaactagtatttctttttttactatactttattttaagtttcttattaggcaaaatatttacaaaaaaggtgaacagaaatgcttgaactaaatagtattagtaaaacattcaaagatgataatactcttattttaaatgatataaatttaaaaattaatgatggtgaaattgttggtttattaggaaaaaatggagcaggaaaaactactctgatgaaaatcattgcaaaaaccaaaaaaccaagttctggaaccgtttacattaataaaaaagatatatttaaagatgataatatgttaaaagatgtgggtattatgatagatactgttcattatgaacatttatcggctgaacaaaatttactttattttttaaaagtaaataatcaacttgaatacataaaaaatattaataagatattaaaattagtgggcttattagagactaaaaacaaaaaagtgaagaactactcttttggtatgaaacaacgactttctttagctatgtgtcttgtaaccgaacctaatttagctattatggatgaaccttttgtaggtttagatcctaatggagtgaactcccttattagttcactaaaaaaatgggttaaaaagagaaacatttctcttttaatatctagtcatcaattaagtgaattagaagaagtatgtaataggttcgttatattaaaaaacagtaaattatataatatatcattgaataaagatacagaattaaaaatattagtttctaaacccataagcattgatgatgctactacatttatggttgaattccctataatcactaacataaaagataatgtcatttatgttagtaaagaaacaaataattttaatgaattactacaaacaattattaaaaaatatagtttgataagaatagaagaaaattctaaagatctatataatatttttgatgattttgagaacgaaggtgttaaataaatgttactaaaaaacatattttttaatatatcttctcgcacttcagctaaattattttattcaatatctttgtatccttttctttatttaatcacattatttttacctactaattttatgcaagttggtggtatagaaaatggtttatcaggtttagacttttattatggtatattactagctcaatcacagtttgctattccgcttatattgataacttattttactagtttatctttctacgaagaaattaacagtggaaaattaattttttacaaagatattaaacggtctaagttactaaattctaaattgttctctttaattttgatgtatactacttattttattttattatttatatcttccgaaattttatactatatattcatcaataattttaaatacgcttctggaaattttttaccaaatgatataaatgatttatatacagatttattaagtattttcagtattataagtatctcttatatagctgtgttttttgctacatttttatcgatgaaattttcaactggattcacaatattaggtgttattttattatttatgattatatcaatagcgcccttaattaaaggcgctcaatacctatttcctaatggttttactaatgctaataatttagaaatgtttttattacaatttttaataataattattatttcttttgtttatatttcgtttttttatcttttaagtttgatcttgttcaaaaaaattgaatattaaattgactatgataaggttttaaaataaatgtgagaccacttttttggtcgtatatttttatgattttgaactgtgagtggctagcaattagccactcattttttcgtagaaaaaatcctaagggtcttggggaatatccccaacaagccggcgacgataccacgtatgtggctagcgacgaaactgttgggcgaaaccgtaaacccaaccgtaaggagccaaaacaaatcagttttcgtgtgagcgaatccgaatatttaaagttacaacaatcagctgaaactttaaatatgagtgtgccttctttcgttaagaaaaaggcacaaggcgcccgattggtcgcacccaaattggatcaagcaacgcgacaatcggtagccaaagatttgagtatgttgggcgcaaatgccaatcagattgcgaaatattgcaaccaacatcaacatgaagcaccgaattataaagcattagaacgtaatatcaacgagttacgtgaaaggttagatgagatatggaaaaaactaaattaagaatattgctatttagcatttggattttaactttattttttaatttttcattcctaaagcaatggtggtttatcaccatctgtttcttattttgtgctttcggtggccttttaattgatcattttattcctacacaaaaaaagcgtgataacaatggcaacaactaaaataagtgcgactaaatcaacgtcacgtgccattaattacgctgaaaaacgtgctgttgaaaaaagtggcttaaattgtgatgtagattatgccaaatcgagtttcaaagcctctcgtgaattgtatggcaaaaccgatggtaatcaagggcatgtgattattcaatcgtttaaacccgatgaagtaaccccagaacaatgtaatcagttaggtttagcactcgctgaaaagctcacaccgaatcatcaagtagcggtctatacgcatgcagatacagaccatgtacacaatcatattgtcattaattcaattgacctcgagacaggtaagaaattcaataacaataaacaagcgttacgtaatgtcagaaattttaatgatgaggtttgcatggaacatggtttaagcgtgccagagaaagacacagcgcgcttacgttatacgcaaacggaaaaagcaattgctgaccctaatacaaaatcaacagcccaatattcatggaaagatgaaatcagagaggccatcgatcaatcacaagcaacgaatatggatgaattcaaagaccatttaaaccaacatgatattgaaattgaacgagtcacacccaaaagcattacctatcgacacttagccgaagataaaaaggtgcgtgggcgtaaacttggtgaagattacaataaaggaggtatcgaagatggctttgaaagacaaattcaacgatggagacaacaagaacgagactcagacaccgaattccagccaaaacaaccaacttcaaaccgtgatgaatcaactgaacgagatacagacgtcactcaatcagattgggaccaattcgcccaagacacaaatgagcttgagtgtagccgataagctgcagagtcagcaagacttgctcatgaaaaggctcgaagagatcgagaagagagagaacgagcgaaacaagcgtcacgaacaattattaatgacgatcgagaccacgacttcgaactttaatcaagcgactgaaattacacaaaagcgttttatcagtgtaacaaaacactatatcgaacgtattaataacgataatttaaaacaagattttcaaacggcgttacaagaagaattggaagatgtgaaaacagacacgcataaggcgatcgagcagttacaaatcaaccaagcagaactgcgacaagcgaataacgattataaagcaaccattgatgaacgtataaagcacaacgaaacagctattaaacaatatgatcaagtgtttaatcgtttaaccaaaggcattacagcgatgttttttattattgctttagtgatggtcgcatttttagttttaagtcccttaggcgactggttaggtgttcaacatttttatgaatggttaaatcatgtattaaaaacaggtcattcaacatggcgatatttgatgactatattctatcttgtcccttatgctttatttggaggccttatatatgtcattttaagagcatacaagcacatttaatatgaatattggacaaaaccacatttgaggtaatgaaaaagatgtatcaagcttaaaaagagaaagggagaaactatgaaaattaaaacttttgcaacttttactcatcataagttagattcacaagtaaatgattttttgaaaaaaaaattaaagtattagaaatacaaacaaatagtaattggttatatatttcaactacgattatttacaaaaatctagaatagttggcgctattatgccgagaaaatttattgtgcattgagaagaacccttaattaaactgtttcgacgaatgtcggtatagcgtgagctatgaaaccgacgagtcgacagttttagggtttattaagggttccgaggctcaatgtcaataaagcaattggaataatgcatcaaagttatatcgcttattgttttttaataataaaaaccaaccacaattgtggttggtttcctttttgtcttttaaatttgtgaggggcaaattgccccgaactttttaatatctttttataaatctttttaaaacctttttaggaggtgctttagacttagagtgccaaggattatagaatgttaaaggcatagttttttgttgttatgactttattaaaaggagggttattatatgagcggagaaactgttatttacaaaaatgaaatgaatttagttccattaagacgctttactgctactgaaattaacttattttttgctatgtgtaataagctcaaagaacaagatactaatacatttcatttgtcttttgacgaactcaaagaattaagtaattacagtccagaaacacgtaacattaacaggtttgtagatgatctccaaagagtttacgataagatgttagatatcagatatactattagaactgaaacaaaaattaaaaaatttgtcttattctataagtatgaaatagatatatcggaaaaatatttagaaattgctacttctcttgatttaaaatatatcttaaattcaattacgaataactttactaaatttgaattaaaagagatgacacatcttaaatccacctattcaaaaaatatgtttagattacttaaacaatataaacatactagctatatgaagattaaaattgaagactttagagaacgattagatattccagaatcttatagaatgtctaatattaaccaatttgttttaacaccgattatcaaggagctctctccaatatttaataacctcaatatcaataaaatcaaagctaaaaaaggtcgtaaaattgagtggttagagtttacgtttgatgctgagaaacgcattcacagtaaacgacaacctcaaatggcggatgtaggtaagtcacgacaatatatcagtcgcgaaaaaacgccgaaatggttagaagaacgcacatatgaaaaaacaacacaaaatgagtatgatccacaattagagaaagaacgagaggcatttttaaaataacttcaagttgattgggaagaatagaaaagttagaaattgagacttatgtaatatcatgatattatataagtaacaagaatttcgtttataaacgcaccaaaccccgaactattcacagtagttcggggtttttgggtacattgactgaatcgtctatgctattttttatcacgtttatggagccaataaccaaataacgtaactagacaaccactgattgccgttgtcatgatgtgaacaagaatttcattcataaagcgcacctcccctctacgtcaaattgacgtctgagagatagacgacttccatattataacaaataacaccagctacataatattatcttacgtaggatagaaattttataagcaattatgatataattttagtgtaatcattcaaaggagggtatcgtaaatgtcatctatcgtagaaacattgcataatgctgtcaattcaggtttacatgttaaacaagactgggtagatatgggctttggtattgctaatacaattgcgaaaattgttgaccaagtactcaaatttgtttaattcaatatcacctatttttagacgcttgagaactgaataaagatacaaactgattattcatgaaaagtgatgaaaacacatcagatcaatgatgtataaaccatgcataaacgataatcataaagaaaaggcttaaacgttgatttaacaccgtttaagcctttttaattgcaattagttaccaaataaacgactccaaaatctctttttaggtggttctgcctccctattatcactggaatcacttttcgttttttcaacaaacttatcctcttttgttaattcatctgtactgtcatgcttgttctcttcagttatatttttatgatttacttcagttggttgacattctttttgttgttggttgatattttgagattcttcagtaaaagttgcttcttgtggattaatattctgtctattattcatcgttgtatcaaaagaataattaagctgtctttcttcttctaattggctttctagtttttgaatttttttattgttttctaaagataatatttgttgattctccaacagtttatttaatgtattaacattgctattttgttgatctaattgtttagttagattctcaatatatttttcatcatttttagctctagtttcaaagatttctatttgcttttctaattcatttacttttgtttttaatgtctcagaactatttgaattattatgtatatacttttcaacttttgcagtattttcattaaataattctttttttactgattctttattatgggttgttctctctttcttagtgattttttctataatttttaaataatcattatctttaatataattaattccattttctttttcaaaagatatatttaatcttttagcattattaacaatagtttgtttagttacacctaattcatcagcaatcattttaatagttttcattacattcacccttaggtacctaatttagtacctaaattttaacacctaacaaattttatttcatcatttagtactaaatttactatctattaactacctaaatgcctaattacccacccataaaatgtttttgctccttaattaagtactaaaatatcgaattatacgtttggtagttttaggtgtacttttaattacatttaaaactctttatatacgcaattgaaagtgttaatattactttataaatattaaaagagtcgatgctacgccaatagcatcgactctcggtaataaaacgattcgcactcgtttgtttatatatttttttgatacttgtattatatatatctaatcatctaagtgcaagcacaaaacatataacttacgtaaaaattgttttattacctcaatcccaaaatggaaatgaggtttttattatgcccaattttgaaaaatataatttatcacaagtaaaaactgaaagattttatcaactgcctaaatatttatttgaagatgcatattttaagaaaatgtctgcagaagccaaaattatgtatgcgttattaaaagatcgttttgaattatccctccaaaatgaatgggtagataaaaataataatatttactttattttcagtaataaacatttgtgtgaatacttaggttatgcagaacaaaaaattataaaattgaaaaaagagttaataaaatttaatttactaactcaagaacgtgttggccttaataaaccaaatagattatacctattaaaacctaattatgacattgaagccagtcatatcaaggaacttccaaattcacagttccagaacaatgaatttggaagttctagaactgtgaatttaagtggtcaagaacttccaaattcacagtctaatgatactgattataatgacactgattatattgagactaattataatgatacgtatgatttgaatgataagaaattaacatattctagtaatcacacaaatcattcaaatcactataattcaaaatttaatgatgaagctttaaaatttcaattactagaagaactaccacaaagtattcaaagttatctaagtaacttttctgtagctgaaattaaaatcatcaaacctgtattattaaaagccaagacgtcctttaataattctattgatgcatattacttattagaagatatggaaatcgaaatacttcatgttcttaaacgttttaaagccatgcttattcaaaaaaatgaaaccgttgaagccatgcaagggtatcttatgaaatctattaaatctgaatttgcagaaatgcatacacttaataagcgacgcgataatttaccaattacttctttatttaatcaataatacaacttaataagtcaacaatgacccaattagagaatatctttaattagatgttctcttaactgtagacgaactttattttcaatgaactgtaattaattaattaagtgggactaaaatcgaaaagttttagtcccatttttataaacaattattattcatggttactactatcagcattttttagtggaacccaagtatttgtaagcacgatcaattacttctttttaaattgatttggcttattcgtattaatgtatttggaatacatctttaacaattcttctgtttcatctggacttaaatgttcacattcaaaatatttttcaagcatggcgccttttcgaatcagtctatgtgctctttcttttctatccaatttttttaatctatgttttcttaattcagctttttcaatggcagcatttgtttttttgagatttttaaaatcattcatcttatcacttactattctgattaatttcgttttcttttaaattttcattgttcctgttactgccattgtgttcgatatttttattaaattcttcaatgactttatccatgattgtatacaattcatcactagagttaatcctatttaaatcaagttcgtttaaaaaataaccaccaattttatgagatagttgtgcttcttgttttttcttttgctctttcagttgttcaatttgttgttctaattgacttaatttcgtaatatctgtttgtttgattttagacatcaaaaaactcccttagtttatctatataaagcatatcatagttcattgggtaagtcgcacattcatggtataatataaccagttcataagacattgcccatttatgtgcaaattaaaaattggcataaaaatgggtaaccctacgggttgatcgttatagttcccacaggggtttaaattcaaaaaaagagaggagttaaaatcatgaagaaaggttactttatgttgagagtgactaacattaatcgagcaactaaaaatatcgttgcatcggcatcgtatcgttctgatgaagcattatatagtgaacgtacagacgaaaaaattaagtttagaaatcatattgttaaacctgaaagcatgattttaacgcctcaacatgcacccgaatggacgaaagatagacagcgtttatggaatgaagtcgataaagttgaaaagaataatgcgaaaacaaaaaatcctagattagcaaaagaagttttattaagtttacctaatgattttgatagagaagtacaaactgaattaacaaaggattttataaaaagtgagtttgtagacaaaggaatggtggctgatatttcaattcatagagatgatatgaacaacccacacgcccatgttctacttactcaaagaccttttaattcagacggtacttgggggaaaaagacaaaaacgagaacgcaatatgatgaaaacggtcatgctattttaaataaaaatggtaataaagttagaaaacaagaacgatttgtcgactttgatttcaaagaagttcgtaagcattgggaattaaaattaaatcaatattcagaacgtgaacaaagtttaagaagatatgatagtcgttcttttgaagaacaaggtttagaaaaaatcgcagaaattccacttacaagagaagaatatagattagaaaaaaatgaacaaagacgttgtgaaaaagagggtattgagtacaaaccagttacttattatggacaaaaaaatgaacagattagacgatacaatcgtggcgaattatcagaagtatataatgataaagagaaagaacaagcacaaaatgcaattagactacttgttcaaaacgctaatgatcaagtaagcaaaaatgaacaaagttattctattttatttgatagatatcaatgtgatgttggctattcagaggcgaaagaaacaattaaaaatatgtttgatagtgcgtctacctttgggcgtaaaattcaaaatgacttactcaaaaatgaaattaagagacgtcaattaaaattctatgctaaaaattatgatgaaaattatcaatttagaaaagaaattgaaagtaaaggatatagtcagcaagaatttgttaatactgttgaaactaactataaagcgttactcaataaaaagaataagttagaaagtagagaagaaaaacgtaaagagatttatcaatcagctaaagatgtttatctgactgaaagcgaaaaaaataatctaattgttcagcaaatgtatcctaaatctcatcatcattttagtgatgatgagaaagcatttatcgttgatgaggcacaaaaaggtaactttatcaaagcgtctaatgttcaatatcaattcaaacaaaataataatattccttcggatgtattgctagaagatacttataaaaaagcaagtaaggatattttctttagtgaaagaaatcttaaaaaactagaaaaagatagctttgagtataacgttgagttgcaattcattaaagaaaaagagaaagaaattgaacgttataaagaagatattgataatgatttaagaatagatataggcgatagaaactttgaaaaagtaaaagatcaaacccctaatgagaaagttcaattactcattaaacttgagaaatataatcatgtcgatcgagaagacattatcgaaaaacatatttatcaaattgatagaaatgaccatgacaatcatcttgaacatgagtatgaacaatctaatcatattcatttaccaacgataaatgccagtgactttcttatgtactatgcgagcgaaactgaaaaacaaaacaatattaatcataagaaaaagaagaagaaagacaatcaaaaacaagagagaaataaccaaatgagaagatagtaggccagtgaaattatacaaagttcattctttagtaataagaaaatgaatccaatgtgatacattgactttgatttaaagattacatttaaaattcatgattatatcacaaccattcgacaatttttgagtttgttaagagtaccgaggctcaacgacaataaaccaaaacaattgttagaactatagccttatatacttttaaatttaaagtggtattattagtataaatatagaggaggttttattatgtctgtaaaaaatatatttaaacaatcttgggaagatcttaaaaatttagagttaaattttaagaatgtaagtattttggttgttgtaacatttatacttagtaatattttaacaccattagtcggcgttcctgtcggtttattaggtagtgcatattggattcaaaatagaaaaagaaaataatcaattaaaccaaaaataaaaagccgatgtatcggctttttttagtggaaataaggtgtatatatattctatatttgacaaggtagtagttttttattattaataatgtttataccactattgtgttagaaatcattctatttaaagttatatgtgttaatatttttatcttttaaaaattcttctattttctcttgttccttgccatttactatagtattatctttttgtaatttttctacatctttatttgaaagttttccatctataaccccatctataacagaatctaaactactatcataacgatttgacgtagaaatatatttgctaattttaaagacattttttttgtagctttttggtaattcattatgttttataaaaaagtagaaatttttgtcattttttttagtcatataagtaaattttttaaatttttcagtttcactttgatttaattgtttattttcataatactccttttttttagataacacagcatctgtgtctaaatatagtttaatatcccttttcatctctttctccgatattttagagcctacaacatttttatcaaaaacttttataggaagttttgataaatccttttctctactgttttcattactttcagaggttgaatctttattagagcaccctgtaagtatgacaattagtgataaaattatagataaatatctttttttcatactatattctctcttctcacaatacttatgttccactttaaaaaagaaataattaatttgaagaaaattttaacaataaaatatcctaatatggctaaaaacagacctaacataatacctttaatcacctcaaaaatattttctaagttaaatacagaaaaaccatttgtaaaacttaatattattaatattattggagaaaataacattaccggaatagctataatacaagctaatataattggtaataataagaaaaaaatgaaaatgctagataatattattataaaattcactatacttagccccataactgagaatatagcgtgtataaaatttttaatacctttttcattttcaactctttctatatcatttaatgcgttaatttcttttgctataaaaaaaggatttcccaaattattagaaatttcatcgtcactcttattatctttatatccattaaggaaatgtgtctcatattcgtttaaaacatcatttttttcagttttatcaagtctttttatgttttttttcaaaatcttaatatattcgtctttactcatgaaaatcactctctttcataaaggaatctattgcttgagtgaatgttttccattcttctattaaattatttaaatgaataattccacttgatgtaattctataatacttacgtgcaggcccttcattagatggttgatagtaacattcaaaataaccctccttaaccatttttcttaataatggataaatagttccttctgatatttcaactttcttttttataagttgaattaaagagtaaccgtattgatcgctttttcttataatcaataaaattaataattctaaagaatcttttttgaattgtatattcatgaaattctacacctctatattatatagtattataaaaaatataatagtgtaaagtacataatagtgtgcggtctgaaataaggtacattttatgtattatcacaatatatttaaaaacgtgtataattgtagaaaaccctgatattatgagattgttcacatatttcagcataataaatactaatgttcataaatttcgatagaaaaaaatgagattaaatatatcttaaagttagggagcaaaataatttggaaacaaaaattggacatcaaatacaaaagttaagaaaaagtaaaaatatgtctcaagaaaaattagcagaaaagttaggcgtatcgagacattctatttctaattgggaaagagaagtaagtaatccagatttaaaaacaattttagaaatcactaaattatttaatgtatctctaaatcaattaattaaaggagtggaaatcatgcaagttaataaatatgtttactcggcattagcattttttctaggaggtttcggggctcataagttttatgttaagaaaaataaaaaggctcttctttatttattattttgttggactggaataccaggtgtgataggtatggtagaaggtgttttgacaattatacgtccgagcgatagtgaaaataatatagaaataaattaaaccaaaataaaaagtcgatccatcgactttttttagtgttcatgtgaatattaaaaaatttatggagtgatgatacatgaacacattcgttttcggcgtgattacaaagcgattagaagaaaaaggccttaatatacacgaggtagtcagtatgagcgataaacaggctaaaaaagacttatttgatgatttatatcattacgtgcgttatacaaagccatgcggtgcagaacttacgatggtggcattagatgcagatgaattaatgcattactttgtatgctgttacatggaacgttatgcttacagatttagcacttaacctttacgacattttgcaaatgtcgtggaactcaaaaaagaggtgactaaaattgaattatcgtctattttaaatttgcataactgagatgattgctagttctcatagtataaaattttgatttcttattattttattggaaaatatagaattgtacttgattgtaaatattggtatatttttaaaaaaggtggtgtaaaacataatattattattaacagttatctcgaatttagttataacattaatttttaaaaattctttaaaaaataatgttggtgatgaaccaaattattttatgggcttaagaaccaagaattcaatgaagaacaaaaaaacttggaaacttacacaacaattttttattccaattagtattaaacttagttgttgttttttaccgttaggtattatatggactgtttttgatataatgtttactatgtcaataatttcaataatagtacaatttatgttatttatcattttaattatattagttacagtaataactgaaaaagaggttaaaaaatttgtctcataataacaaaaaagaagaaaaaattctaacatattaaaaaataaaaagccgatgtatcggctttttttagtgttcatatgaatattaaaaatttatggagtgatgatacatgaacacgttcgttttcggtgtggtctaaatatcctcttaaaatacaaaatagatatattggattattacacgtaaatttgattttagaacataccttttaggtgtttaagtacgcctttggatatataaaataaaaaaagctactagcaaaaaactagtagcttaaatcttagttaaagatttttcgtagatataatttgctaataaaatttctgtcataattgataaggaataatataataaaactaatctaaatagtggaggcgttaaatgtgaaatttgtgtttgatttagatgggactatttgttttaagggagaaccagtgtcagataaaattcttaattctttagaaagtcttaggaatagtggtcatcaagttatttttgcatctgcgagaccaattagagatatgcttcccgttataagcaaggaatttcataattatacaatgataggtggtaatggttcacttattttaagtaacggaaaaattataaaatctgtttctttttcgttatcagaaatgaaaaagattaagcaattaatcaacgaatttgatgctacttatttaattgatggggattgggattatgcatatactggccctcaaaaccattctatattaaaaaatttagatcctttaaattcggctaatcttgttgatttagattctttaaaatttgttgtgaaggttttgattttaacatcgaataataatgaattattgagtaaaaaattgagtgaattagatgtatatgtaaataagcatagaaatgagaatgtacttgatataagtcctaaaggtatacataaatgggctgcacttaaaatgttaggaatagataaaggtgattatatagcttttggtaatgattcaaatgatatatctatgtttgaaaatgcactttatacagtaatggttggacatcatgaggaattaagcagttttgctaaagaatctattgaaagtaaagagaatttggatttaaaaattgtagaaaaaattgaagaaattgcaaataaggatattagcgacttttatgccgagaaaatttattgatgttgagaagaacccttaactaaacttgtaggcgaatgtcggcatagcgtgagctattaagccgaccattcgacaagttttgggtttattaagggttcggaggctcagcgtcaataaagcaattggaataaataagcaatgttttaatcctgttacatcgttgattttattgggatgtaacagggttgtttcttttaattttgactttttgtgagattataaatttataaaaaataaggagaagcttatgttatcgaataaattaaaatctgcacgattagcaaaggaattaacgcaatctgaggtagctaaaaaactatatgttactagacaaaccgtttctcgttgggagcaaggtaaaacgttgcctaatatttatgtaattcaagaattgagtgatctttacggtatctctttagatgaattagtagtaaatacagcgttagaaaataaggaggttaaaagtatgaaaaacgtaaatcctttcgctttacttggagcgatattatttaacatgtttttattttctttaatcgttatattttttggtggctttttactattatctttattcgtttctttgactatgatatttagtcctttgattttagggatatttgttttagctggcgtacaagattttaatgtaattcagttagttatgactgtatttttctttggtattggcgtgctatctattcctttattaaaaaaagttagtgtaactttatttgaattttttaaacaatatttgaaatttaatcataaagcagttttttattgaatttaggaacgagtgaaacgagtttcttcttgtcttgatactatataggaataacgttcttttttaaaataggaatagatacttatatattaacttgaatgatttaaaaaatttgaagatatctatattttactaaaatcaaggttgttattgttagtttttgatgtttatttagacatagaatgacttatcagaagtgcatatgaaatgaccgacatctttgtaaacatcatgactacagcagcaacgataaataggtgactagtccccccctaactactggcatatttaggggggacatgcacgacatctttgttaattgtattgtaacttcatagtagataggaatgcaaaattaaaaaaataataatgattgggaagagataatatgaagattctcttaattaaagatgatatacctatgggaaactaacctcaaaaatatcaaatgcattggcctaaaaatagtatttgaagtgatggaatacttatcagttatttcttatgacattttattaatggatttgaaattattaaagaaatacagatgaaaatataaatattcctattattacgttaaccgctaaatcacagattgctgataaagtttcaggtgtaaacataggtgtggatgattatttaataaaaccatttgaatttgaagaattagaagtacgaatattggaaaacgttatacatttttctaggacacaaactatgcaacaaaacgctaaacaagctcaaatgttttagagaactattaaacaacatattgtaaaattttaaataaatttgatagaaaatttagataaaatgttatattttctaaaagataaagggataagtgaaaaataggtgagtgtttagaaagtaagataaaaaatatatagttaattttaataaaatacttaaacgaaaattaggaaacaaaaaacctcattatatttacattaaattaataacaaagttttgtggatatagtataattagtattgtattgtaatgaattattatatacaattaagtgggttacaagttactttttaaaatttattgtataaagttgtagtgcaactttatataaagaagaaaagggagtgttcttttgaaaaaaacacgaaaaaaattagatttcttaccgaataaattaaataaatattcgataagaaaattcacagtaggcacagcatcaattttagtaagtgcaacattaatctttggggcaggacatgatgtagctaaagcagcagaagaagatgctagtacagaacaagcatcaacagaagaaaaagtaacaagtgaaggtacaacaacagaacagccttcaacagaagagacggcaactgaagaaagcacaacagaacaaccttcaacagaagagaaggcaactgaagaaagcacaacagaacaaccttcaacagaagagaaggcaagtaaagaaagtacaacagaacaaccttcaacagaagagaaggcaagtaaagaaagcacaacagaacagccttcaacagaagaaaaagcaacaagtgaaggtacaacagaacaaccttcagcagaagagaaggcaagtaaagaaagcacaacagaacaaccttcaacagaagagaaggcaagtaaagaaagtacaacagaacaaccttcaacagaagagaaggcaactgaagaaagcacaacagaacaaccttcaacagaagagaaggcaagtaaagaaagcacaacagaacagccttcaacagaagaaaaagcaacaagtgaaggtacaacagaacaaccttcagcagaagagaaggcaagtaaagaaagcacaacagaacaaccttcaacagaagagaaggcaagtaaagaaagtacaacagaacaaccttcaacagaagagaaggcaactgaagaaagcacaacagaacaaccttcaacagaagagaaggcaagtaaagaaagcacaacagaacagccttcaacagaagaaaaagcaacaagtgaaggtacaacagaacaaccttcagcagaagagaaggcaagtaaagaaagcacaacagaacaaccttcaacagaagaaaaagcaacaagtgaaggtacaacaacagaacaaccttcagcagaagagaaggcaagtaaagaaagtacaacagaacaaccctcaacagaagaagcgactaaagaaactacaacaaatcaaccaatttcagaaaaagaaactgtaaatgaagttaagaatgtagcaaatgaaacaggagtatctgaggacgaaattttagctgctttaaataaacaaggtgttaataaagctgatgaaaatgaaattttagctgctttaattaaagaaaaatcggcaactaatgatcaatattcaactccagtagttgctaatacaacaaacacatcttctaaaacgaagacaacttctaacacacctgttagaaacttgttacgtaatagagcaatggtaatggatcgtgctaatacgtcagatttacaagaatcagcagaaaatagtgctatatactcaccaggtgatgctactaaaaaacaaacttatagtggtaaagcatgggtctatagaaatggtaatcactcagcttcttctcaaaaagatgcagtaccattgccaggagttaatgtctacttacaatgggtaaacggaaaaggttttgtatctccagtgtattacactactacaaatccagacggttcatttgcatttgatttatccaaaccagttacagatgagaatgacaatacttatgaatttaaattagcaggagattccaaattcgctataagaacttgggttaaaaatccagatccatctaaatacgatgttgttaaacacggtgatcaaatgtatggttatcatgatcgtttaactagaaaaaatgaatcttgggactttacagcaggagttaatagaattgttaactcacaagttgtacttcaagaaaaacataataatgttgattggttactaaaaccagaaaatgaacgtacaacatctggtacttcaaacggccaatttgaaaatacaggtgattacggtacaatacgcggtaacgtatggtatgaaaacggggatcctaatggctctgatgcaagacgttggggtaaagatacttgggatattaatgcaactaatacaaaagtcgctgcatcatatgttaatgacgaagtaactagattatttgatacttggaaaaatgagcacagtggttatacattagacgatttcaaagctgcacaagcacaaattatcgctgattatgaagcgaaaaatggtgtgggttcacacattgcagaaacagtcgtagcaaatgtagattctaacggtgattattacattccgttcaaaggtatttatggtattagtgcttataaacaaaattcaggtacaagcatttctaaaactatctcagatgaagaatatggtaaagttgtagctgataaagacgtttcacataataacttaatggcttggaacggaacaattggacaaaaacatagacatatcaactctgattatgtatatgttacgccactagttgacgactatgctatttggagtaataatttccaaactaacatgtttgaagggcttagtgatgatattttaccaattggaccaagtgctcaaagctcatataacacatcaggcgtagattttgcacttttagcaccacaaccaatgcacgacatcacgaattataactcaacagatgaattagctagaccaggtgatactgcagaatctagaacgggcggtttattaccaaatcgtgaatatcaagtgcaatggttcaaaaatggtgaaaaattcggaaatccagttactgtaacttctgcagaagatggaacagtaggttcagtacctttaacagtaccagaagatgcaaaagtatcagacgtattctcatctgcagtattcaaacaaggtgtttctacagaatcattaactacagcattagctattgattcattctctattacagaccaacaaccagataatgaagtgtatgaaccaacaacagacgacgttacaaaagattacggtacaccaacaactgaggatgatgtaacaggagcagtaacaattccagaatatccatcagaaaaaggaacaccaacaatcacagttgatgatccaagtacattaccagacggtaatacaccaggaacagtggaagttccagtaacagtgacatatccagacggcacagaagatcatgtgacagtaccagtaacaacaaacgaacaagcagataacgatgcttatgaaccaacaacagacgaagtcacaaaagatcacggaacaccaacaactgaggatgatgtaacaggagcagtaacaattccagattatccatcagaaaaaggaacaccaacaatcacagttgatgatccaagtacattaccagacggtaatacaccaggaacagtggaagttccagtaacagtgacatatccagacggcacagaagatcatgtgacagtaccagtaacaacaaacgaacaagcagataacgatgcttacgaaccaacaacagacgaagtcacaaaagatcacggaacaccaacaactgaggatgatgtaacaggagcagtaacaattccagattatccatcagaaaaaggaacaccaacaatcacagttgatgatccaagtacattaccagacggtaatacaccaggaacagtgacatatccagacggcacagaagatcatgtgacagtaccagtaacaacaaacgaacaagcagataacgatgcttatgaaccaacaacagacgaagtcacaaaagatcacggaacaccaacaactgaggatgatgtaacaggagcagtaacaattccagattatccatcagaaaaaggaacaccaacaatcacagttgatgatccaagtacattaccagacggtaatacaccaggaacagtgtttattgaagttgagaagaacccttaactaaacttggagacgaatatcggcatagcgtgagctattaagccgaccattcgacaatttttgggattgttaagggttccgaggctcaacgtcaataaagtaattggaataaagcaactgacatatatcacaatttcaaaaaacatagtgggggatgtatgtgtttgaaaaattggatgctatagattctgcaccattcgatcttttgttattagcaaacccgtctaaagaattgttgttgaaacatctcgagagtggagaatgctttgtttataaaaataattttgaagttttaggatgttatattttgaaagaaattaacaaaaatagagttgagcttcttgatatagctgttagagagaataaacaagggcttggtataggtaaaaaaatgttatctcatttgtttaactacgttaaaaaaaatggatatacagaaattattgttggaactggtaattcaagtatagatcaaattgctttttatcaaaaagcaggttttagaatgtttgaaatagattttaatttttttgaacgaaattacagtaaaaatatttatgaaaatggaattttatgtagagatatgattcgttttttgaaacgagtgtgaacgagtttcttcttgtcttgatattatataaaaataaagttcttttcaaaaataggtataatcgttaatatgtcagcgtttatgcctacttttatgtatgaaaggaaaaattgataaaaaaaacagtaataagattaaagtgtcgagcaataatctaatactggaggtcttctatgcatttattaaattttacttctggtattacattggccgtactgtcagattcttctttaaataaagtaggagaatcttattactatggtttttatttagctagtttaccgattggagtattattaggagaatttcattaaactatttcaatcattttcctctaggaaaattacatattttcatgtttttttagcttattatgttttatttttacaatatattctaatattactttttccatcctattttctactctaatttgggttcttattggtatacccaatgttttactactttttatagttcagaaaataataaacgttgaaaaaataagaaatgtttacactgtaattaatagtttaagtattgcagtaatgcctgtagattctttgttcgtagctattatatctaaatatataaactcacattttattatgttaatatgtgcgatattagttttactcatctctataatatagatttcaattaaagagttaagaattcttccaaaaacagataaaataactttataacgattatctatacaaattttgaatggagagtacaattatgacatcgtcaataaaagttaaaaatgtttctaaaaatttagaccatacacatgtattagaaaatattagttttcatatacttaaaaattctatcactcttataaaaggaagtaatggttcaggaaaaagtgtaactttaaaattaattgcacatctctataaagtatctaatggttctataagcactgatggacaaataagttatgctcctgatcattttcctgattatttaaatttaacagttaaagaatatttaatatttgtctcaaaatgctatcatatatcatttaacaacgataaaatagagaaaataattaaaggtttaaaattacattatttcttaaattataaaattaaaaattgctctaaaggaacccaacaaaaaataaacctcatacagtgtctaataaaaaatgcagatatttatattttcgacgaactattttctggtttggataacgattctataaattatttagttaattatttatctgagttaaaaaaaacagctaccattattctaacttctcacgaaaattatattaatgaaagattagtaactgatattataaatatagaaacaaaagtacatacttcagtacaaaataaaagggaagataaaaaaatcattgttttagataacttttccagtattgaattatctgaaattgccaataatatatactttgattacgatacaattgaaaaagataataagttaaaattaaaaattcgtgttcctttaagcacaacaaatcaattgctatgtgaattaattcaaagaggcgcagtaatagatactataaaaaatgagggggatgatcaatgaattttctgaactatcaattcaaaaaatttttccgatcttatacatttatacctccatatataactcatattatatggatttgtattttctataattatagtaatcaaaatatactatctagttacgctgcatctgctatcattttattctttatctcttcttggataacatttattatttttgatttagagggaaataatgaaaagcatttattatttatacaattaaattctaaaattaaatttctaaatttaaaaatattttttgcctttatttcttcaataccattaataattatctctttccttttcccaattgttacttataggttttctgaagctataactttccgatacgcctttctaagtatatatttacatattatcgtagtcatattaggtgttattctcggatcattgattcgtatacaaactatattgtctagaaagtatagttggttattattagtactacttactttactatcaattattaaatttatattagttaacaatcaacatattttaaaatacgttttaattattgtgccttccgtaggggaatttttaaactatttcaatcaacctattgcaaaattatggtgttttgactttctaattcttaatactaatatagcggtatatatagtaataactcttattttaattaaccttatatttaaatattcagagaatcattaattaaccctattactaatttaaaatataattaatatggttctgttgcaaagttgaaaataaaagaagttattgaaaacatataaatcaagtagacaaaaatgattatgacaatcgtattgaacatggaaataaacttgataataaaattaatcataaaaaaagaagaaaaacgagtaagaacagaagagaaataactaaatgagaagttagtaagctattgaaaatatacaagtttcattctttagcaataagaagcttaatcaaaagggtacatttactttggtttattgaggagttggaaggttaacgtcaataaagcactatttctttataatctattttcagtagaaaggaattttttatgaatagtaattatattacttttgctttttttaatgaaataccgttgtttgatttcaaatttctattgttaaatcatgagattgagcaatggaaccaggaatatgaagcttttaattttgaatttaatggaattaaatttaaaagtagattggctaaaaaaactcctaaaaaagaggggtattttgttgcatgctggcgtaaaaatgagactaataaaaatagaccttttaacagtaaagaatcaaaagataaattgattattaatatattagacggatctaaaaaaggccaatttattttccctaaagagttgttggttgaaaaagggattattagttctgaaaaacacaaaggtaaaatggctattcgcgtttatcctagttgggaaaagaatttaaataaaacagctcttaatacacagaaatggcaaattccttattttttagattttactaaggggtttaatgagaaaaaaattaaggaattgtatagttcaccataaataacttaaaagctttatataaaggtgattgtaagcattcttgttcatttgactaacgagtgtaatataacaccttgttgtagactttttacaattgttacaagaccacttttaattgtttgaatactcctattttgttgattccataggcttcaaggcgctttaagactcctaccttttggaactaatataaaaaaataaaacgactcaaaagtaattgaagacgttcatttatttgttttgtttttttaaattggtaaggtgtttttaattcaataatgatcatattatttatttttaagttcaaggaaaaagagaaagaataaaattttgctatgctcaattttactaaaaagtgactcaaaataaagctcagtttagctttttattaatttgaaaatttataaaaaacgataaaatacataataagattcattgaatgatcgtactctaaaatattattttttaacttttaattatttcataaatgtctaaagagataaaaatgagcgacatatagaagaatatatttgaagaagcattgatgagtatattgattacaaataacttgaaattgatttcaagttttggatttttcgtagctcttttattccaaaattataaatataatgttttgatttactaccatatagaaatagctcaaagcagttttgtaagtcaaaatcatattcgatttttaaatttagttcacatttgcgttttatgagtctttaaattaaaaatgtataaagaatacctaaacgctttaaaaagtattttaaaattgtaaatagggtatttaaaatttgataactcctatgataatttttattaaaaaggagagtttctgatgattgatttttttaaaaataattcaaatactttttcacaacctatgattttggcatctattctttttgtttttgcaggtcctttaggagtatttttaggagtggttattggacttttacttggtagaaagttagataaaaatggaaattagacacgcatttatactgaaaaaatttattgacgttgagaagaacctctaactaagcttacagacgaatgtcgacatagcaaaagctatgagcccgaccattcgatattttaggaattgttaagtgttcttaggattaacgtcaataaagcaattagaacaaaataattatggtaaattttaaaaagggggggagatattttgaataaaaaagacgagttagatattccctttattatgtctaccgttttgaatattttatttttagttgggttaactttcttagttcaattagaaaatttatatattttaattccatacactattctgatttttataaatgcagtttatctagttgttagggctataaatatcactaaaaatagagcatgacatttaggcgaatttgaaacaagtttcttcttgtcttaatactatatagaaataaagttcttttctaaaaataaggagcgtaaaaagtacataatataaactttgaagtttaggagttgatttataaatgtatcgctatgatattaaacatactatcgctcttgttttgaatgtattttttgtaatatttatgccgttagttattaaatatgggaatacatttataactattatttggataatacttggagcgataaatgcaatttatatttatcgtaagaatgcaaaaatgaaaaaaggattacggaataaaaagtagaacatacatttatgttgagaaaatttattgtgcattgagaagaacacttaattaaacttgcagacgatgtcggcaaagtgtgagctattaaactggccattcgacaattttcgagtttgttgagggttccaaggctcaccgttaataaagcaaaatttttaatagacttaaaaatataaggagattttggatgattttaacgattttaataatctttttattgattaatgctttgccagctttttattttggaaaaaagtattttaatctaaaaaagaataagtctgaggataaagattttgaaagattatctgattctatgatgaatgtagataagataataattccactttctataatcatagttttaatactttattttgttcagaaataaggtttgattttaggttttaaaaacgagtggaacgagtttcttcttgttttgatactaatatcaacgtttttctctgcttttttgcattttaagatctgttaaatagttcataaactatataaaacaccctaaatgctctaaaaagtatcttaaaattgcaaatagaggtatttaaaattttaataagtcttgtgataaagtcctttttaaggagaggttctaatttgatatttatatacataattttttcagctgttttactttattatgctttgaaatatggtatcagaaatggatttgctgaacttgaagctaacaaagaagatttaatttcttatcaaaagagtttaaatttgtttgaagaaataggaaatatttattattcaatttcgacatctaaatctgagcaagtggatgaagcgaaagttatttataatagctcttttgatattttgttttcaggagaaaaaggcaaatatatatttgagaaattaactgagaagaaagaacaaatttctaaattaagtacagagaaataactagttcagaagatgtatttataccgataaaatttattgattattgagaaaagcccttaactaaacctggagacgaatggttggcttaatagctcacgctataccgacattcgtctccaagttttggatttgttaaggcttcgaggctcaacgttaataaaggaattggaataaaacgattatgatttattactcgacaaaatctatatcgtcataagcttttgtccaatgattaggctgtaattcttctaattttttatatttaacttcttgatttttgttagttacacctacttttacttggttactccaatataataatctttcttggcatgtcccacatggtgtaagtattttaaattcgctattttcgtcatctctaacaacgcaaattgagtgagttataacgtcttggtatttatgggcttctaagattgcacctgtttcaatacataatgcactagaagcgtttatgatttctggggcaacagaggtgtatgtgttaccattttttgaatacattgctgctgcgcctccccatccttttggatatcttttttttattagtaatttagcgtcttcgaaaagtttttgttctatattcattttttatccctcttaatttttgttttttgaaacgagtgtgaacaagttacttcttgtgttgatactatatagaaataatgcataattcgagagttaataacaaacaaattaactacgtttttatttgctattatgccgaaaaaatttatcgtaagttgagaagaacccttaactaatttgcaaacgaatgtcggtatagtgtgagctattaaactgatcattcgacaagttttgggtttgttaagtgttccgaggctcaacgtcaataaagtaattatttgttattctcttttgaatttgtatggttcatcaaggtctttttctataatcattgtatctttatcttcaaaatgaagtataccttcttcatctggggaatccttatcaaaatatttatcgttttttggttctgtgtagaaacgaatattcttttgttcttcatctttaaaattaaaattattcagtaagacggactctgatacatctgattctggatttattattttgatttgatcgtcttttatcttcattccagtaccttctataaatcgttttgctgctgaattatcagctgaccaagttccttgcatcttttctttgttagttttgttagtactacatccacttaacacaatagttaagctaagtagaaatactaaaaatgtaattatctttttcatatattaacccaccgttttttctttatggtaacaaaaaaggagcttctttgtttttatcactagtagatatctaagttagtaatcattgtgaaagaagttaggcatcttattaaaattaagctcgttattattactttttgataggtatttaaacataagatcacttatcagtagtaattttgtataagctatacctacttcattaccccttaaacctgatttaattattttttttataaatagtcaccaataaattttactaaaaaatgaataattgtacctaaaataatagctgataaacaaagtaagataatactatatttgtcgcttaatgataataaaaaatacaataagataaaaaatgcaactaatactattttaaaatttttttaaaggtctttttatctattttcaccatctccttttctagattcaagttaatataaaatgatattcacataaattatatgacaacagagaagtcaattaacgtagagagtagatgaatatcaatgttcgaatcttttgttcacattgcgaccatagtcatcatttgtttattatcagtatactaatcatttgagctagtattattgctttaataggcgtagctatattaaaacaattatttataaatcacagcatatctttttttataaaatggaagtataatattagaaagcttaatgctagggaggaaaagtgttggagtttataattgagtttatcttagcaatgatttttattcttttttttaaagtgcaaaaattatttttaccagatacatattttgctttcagtgatccttttattttgggggaaagtgtaagtccatctaaatacttgttgagatcttttgtaatttttttctttaacatgtttttttacttaatattaaatattttttatgaaggtcaagaaatccttaatttgttattaatcgctagttttctaggtgctttcttaatactttggcctattatttttaaacctagccgtaatttagaagttgggttgtccaaaaaatctatattctttttatattgtatttatatatcctttttaatttctagtatgataatttcacttttaactacaagtattatgaatttgttctttaatgatatggatatagtaactgttttttcttcaaataaagaaggaattatctttgaaattcttatgttgcctatactttctgtttttgaagcagtgttcactcataaatacaaatctgttagaaacgaaaatgctagtaatatgaatattaataacaacactgatgctgaaggtgatgaacactatatggatgagcatgaatattctaaaagtcataatgaaaatttcaaatatacagctgcatttattacttttataaatttagggttattagtgtttgacataatcaaaaaaaagaaatgaaagattgatatattatgaaaaataaaaaagtttatctcactgattttgaaatcaaggttttaaaaaacaaatttttgtcaactttttcatggaaccataaaaaagttgaatatatattaaatagtgattcagaaaatagggaaatcattttatttatttttataactgaaaatatgaatagagggggaatccttaattatactctcgaaagattaatactttttttatttcctaattttataaaaagatataatttatctattggatcatttcaaatgaaaccaagttttttagagttttacgcgccatatatagatataagtaaactttttaatttagattattgtattttagttttagataatttttttaaacatacaaattatttagcaaccgatcaacaattatcactatatcattctggtaaaattgataattattataaatctacacatatatatatttatttatataagtggtttgaaaatcattttattaatatgaaaagtcagtaatattatcaaacaaatgaatttattaagtttatagaaattaacatataattaattcaagttttaacacgatagatattgaaatcacatcagtattcttaattacattattagggataaacatttgtttattaagtgtatattatataatactaaagctatagaccatgtgtacagataagagattaaaaaggagcgataacaatgacaatagcaataattggtggattaatagtaacaactttattacttatagatgaaaagttaactaaaaagaagaaaaaatcttgatgtattaaggcataaattaaaaatgtaatatgttagaaagagataactgaaagggaatactttctttaagaatagtgaaaagtgttctgtgaaatttcaaatgctagtcaaaaatattattagtaatacaagacacaaattaggtataaaatcgcatattttaagtagcattaagtcacaaatttatattagcataataattcagtataagattttacaacatatgctaataaaatttaaagaagttttttaaatctataattaaaattgcttaaatgaaaatagctacatagaaaataaatgttaacatagtgtgatttattaaaccgcctataagactaattattagccattatttcttagttcttatggtttttttatagttatttaaacatataatgacttatcggaagttatatgtaactcatctagtacagatgatataatatacaggtcgcctatctctcaggcgtcaatttagacgcagagaggaggtgcatattagatggtcgaagctcttgttcacatcacgaccacagtcatcagtggttgtattgttgcgttatttacgcattggctacgtacacgtaacaataagaaaaaataggcgatattagccaacacctaaaaatcccctcactattgcgagtagtgaggggattggtgcatataatgcacgaagctcttgttgtctaaattataacactggttagtagaggaatgcaaagtaaagaaagttcttaggaatcaatttctaatttttttaataatattacttaatttttttaaacttctattaatatcattctcatcaatgtatgagtaagaaaatcgaatgtagtttttgtagttagaatcatatatttctccaggttgtataagtatattttcttttatagattcattaaacaatttttttacgtttattgatatagagaactcaaaccaaatataaaatgatccactagggttattccaactaccatacatagataaatgagtttttagggcgtctataaatatatctttacgtttttttaattctaattttaattcagatatatgtttttcatgataagtatttagccattttgtggcaatatattgtgatatagaactagcaccatagtcattctgcatttttaaatcagataagtgattaattacatttttatctgctactatccatccaatacgcagaccaggacttaccgttttagataaacttcctaaatataaaacattgtcactatttttcaaagatttcatgggcatcggtcttttttcatcaaaccataaatcagaatatatactatcttcaacaataggtattccgtttttttgacattgatctataattttttgcttttcttctttagtataagtattttgagtaggattgtgtaaagtaggtatacaataaaatatgctgtttttgtagttactacttattttaaatatattattaatatttcgctttatatagttgattgataaagggatcattttcgatttgatattatgccaagtacgtatggaattaatataagaaggtgtttcaataataattttagattgaggaactaataatccatcagctattagttttaatccttgaacagcacctgaagtgatacatatgttatccacatcacatatgactcccctttttttcatataatttactacttctaatctaagacttaattttccttttggttcctcataattcgtttgtatagagtcactaatactgtttgatattatttctttgaacaaatgatttggaattaactttggagataactcgccggtacctagacgtataatattaggattgaattctaattcattgattctttgaatataaaattggttgcttttagacatgctgttccctatataattttgccaatgaatattacttgtaatataagcattccatttatattgagatacataaactccttttttttcaatagtttccaaaatgccataacttttcaaaatatctaatgactgtataactgtagatctattcacattataatattgagaaatttctctttgagatggtaatttatctcctgatgataattcgccattgttaatcttattaataatatcatctattatcattttgtattgaaaatttcccatacttcttctccttaaatctggttggaattttatctttaatctggtagtttttttaaaatttcagattattataacatacaatccaaaggaggggttatgatgtcactgaaattagaaaaagcagttttttctaaagaaatcaaaaaagaattaaaacctttgatgaaaaaagataactatcataatatttttgctttactttttgattggttggttatttttggaagtgcttatttaagcataacaacaggaaatatatttgtttacctgcttagtattattttaattggaagtcgaatgcgagctgatgaagaaaatgatcctgatacaaaaagatatcgtattgttggactagataagccacaggaaaacatcaataaatttataaaagatcacattataaaggtgttattactgtttcatgtgccaaagtatatactaggtacggtatcagctaacctttatagtaaggacatacctaagtcagaactttggactagaaatattttatggttggttttgatatcaacatctatagtatttaatttttggttttaccttattatcttttggtttgtaccacttcttacaacttttcaaattattcgttactgggcagaaatggcagagcattcaggattaaacaatgatactgaattaacagcaagtagaaatacgtttggtatgccttggacaatatttttatttcacccacatcatgataattatcacttggtacatcatttattcccagctattccgcactataatttaaaaaaggcacactctattttgatgcaagataaaaaatatagagaagcacatcattgcacaggatttttcaaaactacattaccaggattttatagtgtggtaaaagatatttgtacatccaatagtaaaatgaaagagagttagtattatgttgcaaccaatcgtacatggtgttttattagcgctaggtctaattctaccgttaggagcacagaatgtttttgtatttaatcaaggagctaatcaaaagaaatttacaaaagctttaccagtcataataacagctggactatgcgatacatttttaataacaattgcagttttaggcgtttcattgattttaatgtctttacctacgttgcaattagtcatatatattataggccttatgtttttattatatatggcgtggtcattatggaatgaaaaacctaataatttagaaaatcatgactctatgagtgctaaaaagcaaattggctttgctatatctgtatcactattaaatcctcatgcaatcatggacacagtaggagtaattggaacaagcgcttctgtttattcaggttcagaaaaattcttattcagtatttctactattatgatttcatggatatggtttattttattagctgtattagggaagattttaggatctatagatcaaactggaaaatatataataattttaaataagatatcaagttttattgttattgtagttagtttgataattgtgaaaaacatcttacatttaatttttggttagatgataaaagaggtatttttataaaatgaaggcgtggtcttaaatgtctaaaagaacagatgcagacaattatgttatcaaaaaatacggaaatgatatcaaattcattcgagaaagtggaggcatcttctattatgaaattagtactttctggagtggaaagtttacaataaaagttaaagatggttttcttgggtggagtgatgaaaaactataagtaaaattagcgttatataaaatgacttatcggaagtagatatgcttgtatattcacagatggtataataatagagtcgcctatctctcaggcgtcaattgacgaagagaggaggtgcattactttgctaatcattttcgttcacatcatagcaccagtcatcagtggctgtgctgttgcgtattatacttattggcttagtaaacgcaacaaataattaataggcgactttataagccagcatcgaaaaaatccccacactattgcagtagtgtggggattggtgcattaattgttaatcattttcgttatctagattataacactggttagtagaggaatgcaaaatagtttattgattactaactagtgagtgatctttaataaagatactatttcactagaaggaatgcctatcttaaacattataaaagatttatgaagttgaagaacaaaattggagatattaaatatattatctttttgatatgtaggtttttctgatggtggaaaataatgagaataataatgtctataatccttcaaataatcatgtaacttttcgtcataattaacaatgctttttaaataattttgtaactcgttatctaatgagtgaaataaatctttatatctatctattaaaatgatttgctgatttgatacgagccttctatgcaaaccttcatttatttttaataagtcaactagataatgttcaataaattttggcgtatacattaacttaatataatttgaaaatatatcttgaaacgaatcatgattattataaaaaaaagaataaatatttgataaatatttattaaggaaatcttttgtaacgtacgtaatttttgttttatggtgctccttaaaattgaatggtaaatctacaaaaaccctaaaagcttcttttttagaatacaatatgatactttcaattttatgtttttcattagttataaagctaaaaatgtaagcaatattaagggcatctgaaatacatttatcactagttaaattgtttttatactcaaattttagtgaattctcatattgaaaggtgatttcgttaaatctagttcttttacgatttattttacaagctgaagaaagacgaacttcattcaatgaaattatttctttctttagattagctttatcgatagaaatagtatattcattgtttgtttgatcccttttaatatcaaatggtatatgatttatattttcttttagaccactaaatttaacacttatgctatcaaaagttttaggaatctctgtatgagaaatagatacccaaatttgagtgaataaatactcatattcgttacttcctggaaaatttatagtatgcctcgataaaatgccgtttctaagatacaatgtttctccttttgcagtaataaattggcattggtttattctttcttcataatccatatcagtattaaataataattgataattactaccatcactttttaaaattccagcttccttaaaatcagatataattaatgttccagatatttcaaaagtatcagtattactaattttttttaatttcattaataaactccttgcttaccaatataaaatagtatttatattatatcatttaatttcagagggtatgtgtttttagagtacaccctaatcatacaaaataagttgttgaaattatcgcaattagaacgtatgattagggtgtatattaattatggagtgaagatgaatgattataggttatgcgagagtatcatcgatagatcataatcatcagttatgttaaactctaacaaaaactaaattatcagaagaattatctagggtattaaacataggtaaatcaattttctatcgccaatagtataaacatcatccatattaatctgaagatagctacataattctttaacagcatagcctttatttgtataaggcgccataaactctattaaatatggtttgttttgaggtttctatgtttaatcatttaatttttcattatataaatcgaataattataaaaagtcatcatactttttattttttaaaaatatttgaaaatttaatagtaatccaattataagatcaaatatcattatcattataatcaaggcaactataatcactgtgacactcgttacataacaagctagtaatctccagataaaattgacattttcaccaattccataacttaacatattacaaagtagtaaaagaataataatacctatactgtaaattaaaattgtcagtgtatattttttaataactctattaggaaacaatagttcatctattaggttctttttcaccagtatctctcgttcaattctatctttgtcacagattttgattttactattttttattttttcctctaataaaataacctcgaacgatctgctaatttttaataaatatgcaggaaaagctaatgttaagcataatgtaattaattcatttacattgttcatgtaacttataaaatagatgaaagttgctactagtgctcctaaaaatatagttatattaagttctacatcaaatattttaaaaatatctgctctattcatcagttaatcatcctttcaaggtttattaatactaataaattattagatataggtatatcatattattaatttaagaaattgtcttttataattttacttaataataaaaaagtagaaccatttaaaattaatggttctactttttaactattactaattttaaaaataaactaatctacaatatctaaaaatatatgtttagtactatttttgtttagttatatcaagtgatttgggaattaacaaatagacaactattgaaatgataatcatgataatcccacctactaaagcagttgctacaaaagcatcattaaatgatgttacagcctcgtttgcaagctgttttatccccgtagctttagctacttcgacagcgcccactacagattcttcagctacatgagctaaatctccaactataccttttgatgaaaaagatgaaatatctaaaaatacacgataaagcatagaagataggctaccaagtactgctacaccaaaaacatttccaaggtcatacatagactcttcaacagcagctgcattacctgcttttgatgtaggtgtttctaacattattagagcagatgcaactgctagtgaagccgtaccagctccaactaaaattaatgctaaagccattgtagaatatgataatggatgaccaaagaaatacataataaacatgccaatggctgcaattccaattccggaaggtaacactattttcggtccaaatcgcgccgctaatccgggtgcaattggtgcaaacaccatatctcctattgccataggtaataggtataagccagctttaaaaggagaaagttcttccacaacctgtaaccattgtgaagctaataacaaaacagatgtcattgcaaacattgtcataaatgcagcaattgtaccagctgaaaatgatctctttttaaaaagtcttacgtctaacattggatcagaacttgataaattacgtttaacaaatatcactatcatggtaattgctaatactattacaacccatggaataatatctgctagtccttcttttgaaaattctttgatactccataccagtccaatcatgcctgcaattgataaaattgtagaaggaatatcccacgagtgagacttttcttttgataacttagactctggtaataaaaataaacctgctacaactgctattatcacaaacggtacattaattaaaaatgccgagtgccatgaaaattgctcaagtaaagctcctccgataattggtccaaaaacagcacctatcgatgaaacgattgaccatacagctaatgcagtggccctttctttagggttttcaaaaattactcttatcattgaaagagtagttggcattattaaagcacctgcaataccaagtaaaaatcgaatagctattacgaactctgcactttctgcgaaaaatatagctaatgaaacgaggccaaataaagcaaatccagttaataatgctttttttcttccccatttatcagcaaaggcactcaatggaattataaagccagctaaaacaagagagtatatatcaactatccataactgttgggtaccagaaggctctaactctcttactaattccggtaaagccataattaatattgtcatatccattgtaacaacaaacaaactaacagctaatactactagtgcagtccatcttttttttgatgtcatcatatcagtagtttttgtaaaaaatgaaatcatttaagttccctccaatccttatagaccgttcgaccggtctataaggattataatctatttttttacatattacaacaaaaaatcttgcgaaatttaaatggctgtattgtgttatacaattattctttgaattttttgtgctatcattgatagtacttaatactcattaaaggcgtgatgaacttgaaagataaaatactaggtgtcgcaaaggaattatttataaaaaatggatataatgccactactactggagaaattgttaaattatcagaaagtagtaaagggaatctttattatcactttaaaacaaaagaaaatctatttttagaaattttaaatatagaagaatctaaatggcaagaacagtggaaaaaggaacaaatcaaatgtaaaactaatagagaaaaattttatttatataatgaactatctttaacaaccgaatactattatccacttcaaaacgcaataattgaattttgcactgaatattataaaactaatagcattaatgaaaaaatgaataaattagaaaacaaatatatagatgcttatcatgtaatttttaaggagggtaatttaaatggcgaatggtgtattaatgatgttaatgctgttagtaaaatagcagcaaacgctgttaatggaattgttacctttacacatgaacaaaatattaatgaaagaattaaacttatgaacaagttctctcaaatttttttaaatggacttagtaaataattatatatatattcttgaaataccaataaatattatttctaaattacgttcattattgataaaaaatttaaatagtattactacacaaaaagagagtgcgaattcgcactctcttttttcttgtataattattaaaagatcatttcaataatataatatgagttttgagactctgtgagagcctcttatttgcattgacgacccatttatcaagatgatcccttatcatgcttaattctataaactgtctgtcttgtgatattaacttctttcgcaatcttactaattgctttcccttcttctaacatttccaccacgcgatgataaataatacgtttctgtgggtctttggcatttggtgaataaagtaaggggcgccctttatatacgcctttttccttcgcaacttgaattccttgcgcttgtcgacgtttactttcatttctctcttgttctgaaaccattgctaaaatttgaacgattaaatctttcataaacttatccagtaatggattgccaatcacttcattcatcataggtaagctggtaatcattaactgaacgtctttctcttttaaataactcacagtttcaataatttcatcataatcacgtcccaaacgatcaatagattccacaacgaatcgatctcccattctgacaaaattgagtgcttcttgaaatacaggtctattttccactgactttcccgactgtttctctgtaaagattttctccacaccaaacgtctttaaattatccaattgtctttctaaattttgatctatcgatgatactctcgcataacctataatcattcatcttcactccataattaatatacaccctaatcatacgttctaattgcgataatttcaacaacttattttgtatgattagggtgtactaagtgaatgattatacattcaaaactagatagtaagtaaagatttgcgtcgcaaaacttgaaaaaattgattaagtcttcgatcgattagtattcgtcagctccacgtgtcaccacgcttccacctcgaacctattaacctcatcatctctgagggatcttataaccgaagttgggaaatctcatcttgaggggggcttcatgcttagatgctttcagcacttatcccgtccatacatagctacccagctatgccgttggcacgacaactggtacaccagaggtatgtccatcccggtcctctcgtactaaggacagctcctctcaaatttcctacgcccacgacggatagggaccgaactgtctcacgacgttctgaacccagctcgcgtaccgctttaatgggcgaacagcccaacccttgggaccgactacagccccaggatgcgatgagccgacatcgaggtgccaaacctccccgtcgatgtgaactcttgggggagataagcctgttatccccggggtagcttttatccgttgagcgatggcccttccatgcggaaccaccggatcactaagtccgtctttcgaccctgctcgacttgtaggtctcgcagtcaagctcccttatgcctttacactctatgaatgatttccaaccattctgagggaacctttgagcgcctccgttaccttttaggaggcgaccgccccagtcaaactgcccgcctgacactgtctcccaccacgataagtggtgcgggttagaaagccaacacagctagggtagtatcccaccaacgcctccacgtaagctagcgctcacgtttcaaaggctcctacctatcctgtacaagctgtgccgaatttcaatatcaggctacagtaaagctccacggggtctttccgtcctgtcgcgggtaacctgcatcttcacaggtactatgatttcaccgagtctctcgttgagacagtgcccaaatcgttacgcctttcgtgcgggtcggaacttacccgacaaggaatttcgctaccttaggaccgttatagttacggccgccgtttactggggcttcgattcgtagcttcgcagaagctaaccactcctcttaaccttccagcaccgggcaggcgtcagcccctatacatcaccttacggtttagcagagacctgtgtttttgataaacagtcgcttgggcctattcactgcggctcttctgggcttgcaccctaaagagcaccccttctcccgaagttacggggtcattttgccgagttccttaacgagagttcgctcgctcaccttagaattctcatcttgactacctgtgtcggtttgcggtacgggcacctaatctctatctagaggcttttctcggcagtgtgaaatcaacgactcgaggaaacaatttcctctccccatcacagctcaatcttaagagtgccggatttgcctaacactcaatctcactgcttagacgtacaatccaatcgtacgcttcgcctatcctactgcgtccccccatcgattaaaacgattataggtggtacaggaatatcaacctgttatccatcgcctacgcctgtcggcctcagcttaggacccgactaacccagagcggacgagccttcctctggaaaccttagtcaatcggtggacgggattctcacccgtctttcgctactcacaccggcattctcacttctaagcgctccacatgtccttgcgatcatgcttcaacgcccttagaacgctctcctaccattgtccaaaggacaatccacagcttcggtaatatgtttagccccggtacattttcggcgcagtgtcactcgactagtgagctattacgcactctttaaatgatggctgcttctaagccaacatcctagttgtctgggcaacgccacatccttttccacttaacatatattttgggaccttagctggtggtctgggctgtttccctttcgaacacggaccttatcacccatgttctgactcccaagttaaattaattggcattcggagtttgtctgaattcggtaacccgagaggggcccctcgtccaaacagtgctctacctccaataatcatcacttgaggctagccctaaagctatttcggagagaaccagctatctccaagttcgattggaatttctccgctacccacagttcatccgctcacttttcaacgtaagtcggttcggtcctccattcagtgttacctgaacttcaacctgaccatgggtagatcacctggtttcgggtctacgaccaaatactacacgccctattcagactcgctttcgctacggctccacattttctgcttaaccttgcatcagatcgtaactcgccggttcattctacaaaaggcacgccatcacccattaacgggctctgactacttgtaagcacacggtttcaagttctctttcactccccttccggggtacttttcacctttccctcacggtactggttcactatcggtcactagagagtatttagccttaggagatggtcctcccagattccgacggaatttcacgtgctccgtcgtactcaggatccactcaagagagaatatattttcaactacaggattattaccttctttgattcaactttccagatgattcgtttaatatattcctttgtaactccgtatagagtgtcctacaaccccaataagcaagcttattggtttgggctcttcccgtttcgctcgccgctactcagggaatcgaattttctttctcttcctccgggtactaagatgtttcagttctccgggtctgccttctgacaagctatgaattcacttgtcgataacacaacataacttgtgctgggtttccccattcggaaatctctggatcaacgcttacttacagctacccaaagcatatcgtcgttagtaacgtccttcatcggcttctagtgccaaggcatccaccgtgcgcccttaataacttaatctaatatagttattaatctgtgagtgttctttcgaacactagcgattatttttatgaattcaagcttatttaaaactctattcactcggttttgcttggtaaaatctatttacttacttatctagttttcaatgtacaaaccaacaactgaggatgatgtaacaggagcagtaacaattccagattatccatcagaaaaaggaacaccaacaatcacagttgatgatccaagtacattaccagacggtaatacaccaggaacagtggaagttccagtaacagtgacatatccagacggcacagaagatcatgtgacagtaccagtaacaacaaacgaacaagcagataacgatgtagatatccataaagaccataatgacaaagcagatgaatcaaatggtaaagaattaccagatactggtaataacgatcaaaataatggcacattatttggttcactatttgctgcacttggaggattattcttaattagcagacgtcgtaaaaacaaaaataatgaagaaaaataataattagatttcatatttcataatgtagttcaaaaccaggccatagaaggcctggttttgttttaaacactaagatataaattaacagaactaaatatttaaaataaggaggaaacaaaagaatttgaaaataaattaacaaaaaagtaaacaaaaaacttttttacaatgtgtgagtatatttataaatgttatagagttaatagattaagagaagttttatcttacaatttaaatgacgaaacatttaaaataaatgtcttagtgtatattgaggaagaggttaatagttatttaggagacgatttatatctaaaaagtcctataaaattattgactcaattgatcttacgtagagcaaagaaagaacattatattagttatatgaaaattataagattaaataaactactaacataagatcacttatcgaaagtgcatatgctttaaaagatacagatggtataatagtggagtcgcctatctctcaggcgtcaatttgacgtagagaggaggtgcatcaaatgatagatattcttgttcacatcgtgaccacggcagcaagtggttgcattgtcacattctttgcgtattggcttcgcaaacgtgatgataagtaaaataggcgactaaaccacaccaaaaacccctcactactgagaatagtgaggggtttggtgcatcaaatgcagatattcttgttaaacatattataacatcatagtggatgggaatgcaaagactagtctaaagactttttacatatgaattagtaccattaaaatgatttggttcgattaatctagcggcattaatcttcccttttaatgatattacttggtgctttagttcttggttattttttacattttcaaaatcttttaagatactaattcttaaactatttggaatcttcaactcataattttttaatataactcctgtgatttttgcaccttttttgaccgatttataatttgtttttttgtattttaaagagtgattaaatttccgagcttctatatcaatgtgattaatcaagttttggtagttaaaagagctatctttggaaaatgttaaatcatctacatataaagtcattttacaattgaatttttggctaatattaaacatattaatgaacatttcttcatatgcaaaatatgcgaggatttggctacttggggatccagttgggatatactttaaagtagttatatcagatagtaattttgcaacatctggagaagtcatcaatttttttgcaaaaaattgatatactctatcgcgagaacaattattataaaaactacgaatatctgttgtacagacatattgtgcaccgatatgataatgagcgttatttaaatatgatttttctttggtagatgatatgacccaatctggtttttctattttattgagtaaattgagcactcttttttgtatagatttcaattcctttttaggtgctgtaatttgcctttttttattgaaagtatagtattcttgttcaatagattttgaaagtctctttagattttttaaatcggttttaagtaaactagctaattttttcttagatttacatttataaaaagcacactgatggattggatattttttaaattgtttcaaatcattcttcctccaattcatcagtgtgtttatttaaaattttgattaaccttttctgtataaacatctcaggtttacttttacgtttgttttcactatagtcttctgccattaacataattgtagaaacttttatttcaaatatttgagaatatttatttaacaattctaaagaaggagtctttttactgttttctatttcagaaagatagctaggagatatattgatatcgtgagctaaatcttttgctgaaacggagtacagtagtcttaatttttttaaaatttctcctattttcataataattcacctctttattaaaagaatcaggaaggaactaacatattacttaaagagttcagtaatagaattaagtagcttgatgcataaatgggcaatctccagtaaatttttacaaaattgaaatttccatgtgctactattcttagttagttttactttttttgaagaacttttatattgtttcatagttttctactccttctgtgtctattgaattatataaaaaatatagacacccctcagaagaaatggtacaaaaaaagttcagccttcccaataattttcgtgttcggaggtcccctccgaagaacacgaggcgcttgtagcgccgaggggttctcgggctacgcaatcatcgtgcagcgccttaaaaggtagaatgaatagtttatattcattcctcgagcaaattgctccaatgtataggggattaccattaaaagttcttgtatataatatagcacgaagaaagtattttggcaaattaaattcgcttatagcgaatttaattttcttttatataattatgtaaagagatttatagtgccgaagagtatattattaatcaaatattctgttgatatattcaataactgtcaatttacagtacaccctaatcatacaaaataagttgttgaaattatcgcaattagaacgtatgattagggtgtatattaattatggagtgaagatgaatgattataggttatgcgagagtatcatcgatagatcgttgagaagaacccttaactaaacttgcagacgaatgtcggcatagcgtgagctattaagccgaccattcgacaagttttgggattgttaagggttccgaggctcaacgtcaataaagcaattggaataaagcaataaactatttataacttttgccaaaggtttcgtaagttagccaacttatcaataaaaatatgattgctatagttgtaactagattactttgtaaaaaaggcagtatatcatgatgtgtagctaatcgaatgcctcttagtacaaaattagaaattaaaataattatgcctaataatcctatgacttccccgagattaaaaagcagtggatgttttaatttcttaccgtcttcaacgattttatttttcaaaaaatcatctccttttagaagttcgtctacagtaataccaaatagttcacttagttctataagtgtttcgatatttggataacctttttcaagttcccattttgatattgattgtctactgatattaattttattcgctagatcttcttgagataaattaagtttttttctttcttgcttaagtttttcgtggaatttcattaggttatcctcctgtgttctaaatttaaaactttttagggatgattataagaatatgatagttgcaatgtgtaaccgtaaagttgcattaaggtgatttaaatatattactaagtatatttgtaaataaagatataaataaaaccctaaataaagtcttaaataaaaataatgatttaggactttatttagggtttttgaaacgagttgaaaacgagtttcttcttgtcttgatactatatagaaataactcaaagaattaaaatgttttaaaaacgttggtatgacaacatttgtgttgttttttcagcgtgaaagaaaaaattgacataaaaaaaccccagttatatgattaaggtgtcgaatctaaatcaaaactggaggtctttttatatgcaatataatactacaaaatatatagacgaaaatcaagataatgaaacattgaacgatatgactaaaagtgggacacaacgcccatggagagaaaagaaaatcgacaatgtaagttatgcagatatactagaaattttaaaaattaaaaaggcttttaacgtgaagcaatgtggtaacgtcttagaatttaagccgactgatgaagggtatttaaaactttataaaacatggttttgtaagtctaaattatgtccggtttgtaattggaggcgttcaatgaaaaatagttatcaagctcaaaaagtcattgaagcagtggttaaagaaaagccaaaagcacgttggttattcttaacactttcaacaaaaaatgcgatagatggtgagcatttagaacagagtttaaaatatatgtcgaaagcttttaacaagttaaaaatgtatgcaaaagttaaaaagaatttaatcggttttatgcgttcaactgaagttacagttaacaaaaatgacggaagttataatcaacatatgcacgttctattgtgtgttgaaaatgcttatttcagaaaaaaagagaattatataacgcaagaagagtggatcaatttatggcaaaaagctcttcaagttgattacaaaccagtcgcaaatatcaaagcaattaagcctaataaaaaaggcgataaagatatacaagctgcaattaaagagacatcaaaatactcggttaagtcgtccgattatttaacaggaaaccatgaaaaagacgcagaaattgttcaagatttagaacaaggtttatacagaaaacgtatgttaagttacggtggtttacttaaacaaaaacataaacttttaaatttagacgatgccgaagaaggtaatttaattcaaacgagcgatgaagaaaaaacgactgaagaagaacaaaaagcccattcaattacggctatttggaattttgaaaaacaaaattatttcttaaaaaatttgtaacgttagcttatcaaagctagcgttttttttatgcttttttgcccctgcaggaactatagcgttcaaccggcatggttgaacagtttttatgctaatttttaaatttgcatgtaactgggccagtgtctaaaaaattcgacactggttttgctcaaatttttgtttgtgaaaagcaattatttttatttggctctcatttgcgttttaagagctaatataggtttttaggtataaaactatataaataacccctaattcttcaaaatacccctttaaaattaaaaataaaggtatttaaaattagacaaaataaaaaagccaatccgtataaaacgaactgacttttaaagagctattcttttatcgtggaattaatttttatatctgtgccacgacaccgattcttttgtatttgatataaaaatcgacggaggtcgatttcgcttttagcacaacgttctgaaagaacgtataagtgcgcccttacgggatttaactagattataacgttgaaaaatgcacctgtaaagcgataaaacttttgataaaatttattaaaaaaggagtcgttttttatgaatgttggtttgtttttgataatcgttatttgttgtggtttgttaccaattataatttcggtaaatgaaaaaaataagaagaataaaaagaagtagagcacgcatttatgccgagaaaatttattgatgttgagaagaacccttaactaaacttgcagacgaatgtcggcatagcgtgagctattaagccgaccattcgacaagttttgggattgttaagggttccgaggctcaacgtcaataaagcaattggaaacgatatgttttttaagaaagagtctaaagagattaaacaaaaataagaggaatttgattgattttgattttaggttttgaaacgagttgaaaacgagtttcttcttgtcttgatactatatagaaataattatctttttaaaaatatcgctcaaatgttgatataacaatgtttgtgcgtttttttgtcgttgaaagaaaaaattgacataaaaaaaccccagtattaagatttaattgtctagaaaaaaccaaaatactggaggtccttatatgcatttttatactacaagaagtgtagacgaaaatcaagataatgaaacattgaaagatataactaaaagtgggaaacaacgcccatggagagagaagaaacttgataatgtaggttatgcagacatacttgaaattttaaaaataaaaaaggcttataacgtcaaacaatgtggtaacgtcttagaatttaaacctagcgaagatgggtatttgaagttatataaaacatggttttgtaaatcaaaattgtgtcccgtttgtaactggaggcgtgcaatgaaaaatagttctcaagctcaagaagtgattgcagaagtggttaaagaaaaaccaaaagcacgttggttatttttaacactttcgaccaaaaacgcgatagatggaaagacattagaaaatagtttaaaagaaatgactaaggcttttcataagttatttaaatataaaaaagtcaataaaaatttaattggttttatgcgttcaaccgaagtgacagttaataaaaaagacggtagttataatcaacatatgcacgttttattgtgtgttgaaaatagctattttaaaaataaagaaaattatattactcaagaagaatgggttgatctttggcaaaaagcccttcgagttgattacaaaccagtcgcaaatattaaagcaattaaaccaaataaaaaaggcgataaagatatacaagcagcaattaaagaaacatcaaaatactctgtgaagtcgtcagattatctaacaggtaatcatgaaaaagacgcagaaatcgttagtgatttagaacaaggtttgcacagaaaaagaatgttaagctatggtggtttgcttaaacaaaaacataaaattctaaatttagatgacgcagagaatggcgatttaataaaaacaagtgatgatgatgtgataactgacgaagaagaaaaagcacattcaattactgcgatttggaattttgaaaaacaaaattattttttaaaaaatgtgtaacgttagctgaaaagctagcgtttttttatgcttttttgcccctgcaggaactatgcgattaaacggcacgtttacccagcttttatgccaatttttaaatttgcatgtagatgggcagtgtctaaaaaatttgacactggttaagcaaaaatttttgttttgtttttctaatttttaaatttagctcatatttgcgttttaagagccataaaattattttaggtataaatatatataaaatacccctaaatgctctaaaaagtatcttaaaattgcaaataagggtatttatttttttaataagtcttatgataaagtttgctaaaaaggaggtctatttttggttatttatatttcttgtgcgcttttaatattaattgcaattatggcacttataaaaaatgcagtaagtgataaaaaagataaaagattggatattttatctagtgtattacttttagtatcgtctttacttttgatttatggaatttttattaataatttttattaattagaccacgcatttatgccgagaaaatttattgagcgttgagaagaacccttaactaaacttggagacgaatgtcggcatagcgtgagctattaagccgaccattcgacaagttttgggattgttaagggttccgaggctcaacgtcaataaagcaattggaataaagcaattatgttaatttaagaatcgtggaggtgtaagtatcaagaataaactttttaatgcaactaaagacgctatttttattatcttaattatttttttagtagcgactgtgttaaattacatggatttgaatataaatttaaataaatatgggagtaaacttggaaatttaggaataataaatatttacgaaaataataatttaaatgggttggtaacaataggttttatattagctggattatcttttgtttacgatatgttttttaagaaagagtctaaagagattaaacaaaaataagaggaatttgattgattttgattttaggttttgaaacgagttgaaaacgagtttcttcttgtcttgatactatatagaaaaacgatgaaagagcgaaaaaaagagcgaaaaaatatttcttaagaaaagagtcgaatttcggctcttttcttattttttgaaacgagttgaaaacgagtttcttcttgtcttgatactatatagaaataactgtcttttttaattttaggtgtaatcgttgatacaacaacgtttacgcctttttttaggcgtgaaagaaaaaattgacataaaaaaaccccagtattaagatttaattgtcggaaaaaaccaaaatactggaggtctttatatgcatttttatactacaagatgtgtagacgaaaatcaagataatgagacattgaaggatatgactaaaagtgggaaacaacgcccatggagagaaaagaaaatcgataatgtgagttatgcagatatacttgagattttaaaaatcaaaaaggcttataacgtcaaacaatgtggtaacgtcttagaatttaaacctagtgatgacgggtatttgaagttatataaaacatggttttgcaaatcaaaattatgtcctgtttgtaactggaggcgtgcaatgaaaaatagttctcaagctcaaaacgttattgcagaagtggttaaagaaaaaccaaaagcacgttggttatttttaacactttcgactaaaaatgcgattgacggagaaactttagaaaatagtttgaaagaaatggctaaagcttttcacaagttgtttagatataaaaaagttagcaaaaatttaattggttttatgcgttcaaccgaagtgactgttaataaaaaagacggtagttacaatcaacatatgcacgttttattatgcgttgaaaatgcgtattttagaaaaaaagaaaattatattacccaagaagaatgggttgatctttggaaaaaagcacttcaagttgattacaaaccagtcgcaaatattaaagcaattaaaccaaataaaaaaggcgataaagatatacaagcagcgattaaagaaacatcaaaatactctgtgaagtcgtcagattatctaacaggtaatcatgaaaaagacgcagaaattgttcaagatttagaacaaggtttgcacagaaaaagaatgttaagctatggtggtttgcttaaacaaaaacataaaattctaaatttagatgacgcagaaaatggcgatttaataaaaacaagtgatgatgataagataactgacgaagaagaaaaagcacattcaattactgcgatttggaattttgaaaaacaaaattattttttaaaaaatgtgtaacgttagctgaaaagctagcgttttttttatgcttttttgcccctgcaggaactatgcgattaaacggcacgtttacccagattttatgccaatttttaaatttgcatgtagatgggcagtgtctaaaaaattcgccactggttaagcaaaaatttttgttttgtttttctaatttttaaatttagctcatatttgcgttttaagagccataaaatcattttaggtataaatatatataaaatacccctaaacgctctaaaaagtaccttaaaattgcaaataagggcattataatttttatttagtctttaaatattttgttagcataaaaaaatgaggagcgtgaaaaaagatatgcctaaaaaatcaaaattaggaaattcattagcttttaattattttttattgcttataggtgtattaacttttcttggttattattttttaggagaggttaacgttatgatgagttggttaatggcaatgggtccgataattattggatttgtaaacataggtaggatgaaaaatgaaaagtagactacgcatttatgccgagaaaatttattgtgcgttgagaagaacccttaactaaacttgtagacgaatgtcggcatagcgtgagctattaagccgaccattcgacaagttttgggattgttaagggttccgaggctcaacgtcaataaagcaattggaataaagcaactatgttatactcgtgaaaaatggggaggtgtttttgtgagtaaattgttaggttcaccatatctaagtttaattctgttacttggaattttaataccgatttattctacaaatgctttcggtgagtatacggtatatcctttagcaggacttgctataatcatggttttaaattctggttttgcagttaataaaacgatgaaagagcgaaaaaaagagcgaaaaaatatttcttaagaaaagagtcgaatttcggctcttttcttattttttgaaacgagttgaaaacgagtttcttcttgtcttgatactatatagaaaaaaattatattacccaagaagaatgggttgatctttggcaaaaagcacttcaagttgattacaaaccagtcgcaaatattaaagcaattaaaccgaataaaaaaggcgataaagatattcaagcagcgattaaagaaacatcaaaatattcggtgaagtcatcagattatctaactggtaatcatgaaaaagacgcagaaattgttagtgatttagaacaaggtttgcacagaaaaagaatgttaagttacggtggtttacttaaacaaaaacataaaattttaaatttagatgacgcagaagacggtaatttgataaaaacaagtgatgatgaaatgacaactgacgaagaagaaaaagcacattcaatcactgcaatttggaattttgaaaaacaaaattattttttaaaaaatgtgtaacgttagctcaaaagctagcgtttttttatgcttttttgtccctgcgggaactatgcgattaaacggcacgtttacccagcttttatgccaatttttaaatttgcatatagatgggcagtgtctaaaaaaatcgacactggttaagtaaaaattttagatttgtttttctgatttttgaatttagctcatatttgcgttttaagagtcgttaaatcgttttgggtataaatatatataaaatacccctaaatgctctaaaaagtaccttaaaattgcaaataagggcattttaaaatttaaatagttcttgtgataaagttcttctaaaaaggagtgataattttgaaatggattttgtttagtatacaaatgattttggcaatatttttggtgttctttgcttataaacaaatgaatcaaaactatttagattcttggtttggcatttatgtggtacttttcatgatttttgtatattggaatgctaaacgttatcacaattattaaatgacgcatttatgccgagaaaatttattgatgttgagaagaacccttaactaaacttgtagacgaatgtcggcatagcgtgagctattaagccgaccattcgacaagttttgggtttgttaagggttcggaggctcaacgtcaataaagcaattggaataaagcaactagggtaaaattaaaaaaaaggaggagatattttgaataaaaaaaatgagtttgatatgacttttattatgtctactgttttgaatattttatttttagctggactaacttttttagttcaatcagaaaatttatatattttgattccatacactattttgacttttataaatgcggtttatctagttgttaaagctatgaatattgctaaaaatagagcatgatttttaggcgaatttgaaacgagtgaaaacgagtttcttcttgtcttgatactatatagaaataactcaaagggtaaaatatagccttaaagcttgatatatcaacgttttatctattttttaagcgtgaaaagaaaatttgacatgaaaaaaccccagtaataagattaatgtgacgagcaaaaatcaaatactgggggttctttatgcatttttatactacaagaagtgtagacgaaaatcaagataatgaaactttgaaagatatgacgaaaaacgggaaacaacgcccgtggagagaaaagaaaatcgacaatataggttatgcagatatacttgaaattttaaaaataaaaaaggcttataacgttaaacaatgtggtaacgtcttagaatttaaacctagcgatgacgggtatttgaagttatataaaacatggttttgtaaatcaaaattatgtcccgtttgtaactggaggcgtgcaatgaaaaatagttatcaagcgcaaaaagtgatagaagaagttgttaaagaaaaaccaaaagctcgttggttatttttaacactttctacaaaaaattcgataagtggcgagcatttagaccaaagtttaaaagagatgtctaaagcatttaataaattaaaaatgtattcaaaagttaagaaaaatttaattggttttatgcgttcaactgaagtgaccgttaataaaaatgacggaagttataatcaacatatgcacgttttactatgtgttgaaaatgcgtattttagaaaaaaagaaaattatattacccaagaagaatgggttgatctttggcaaaaagcacttcaagttgattacaaaccagtcgcaaatattaaagcaattaaaccgaataaaaaaggcgataaagatattcaagcagcaaacattcaaaactgaatacaatatgtcacgttattccgtatcatctctacgagatgttccgaatatatccttagaaaggaggtgatccagccgcaccttccgatacggctaccttgttacgacttcaccccaatcatttgtcccaccttcgacggctagctccaaatggttactccaccggcttcgggtgttacaaactctcgtggtgtgacgggcggtgtgtacaagacccgggaacgtattcaccgtagcatgctgatctacgattactagcgattccagcttcatgtagtcgagttgcagactacaatccgaactgagaacaactttatgggatttgcttgacctcgcggtttcgctgccctttgtattgtccattgtagcacgtgtgtagcccaaatcataaggggcatgatgatttgacgtcatccccaccttcctccggtttgtcaccggcagtcaacttagagtgcccaacttaatgatggcaactaagcttaagggttgcgctcgttgcgggacttaacccaacatctcacgacacgagctgacgacaaccatgcaccacctgtcactttgtcccccgaaggggaaacttctatctctagaagggtcaaaggatgtcaagatttggtaaggttcttcgcgttgcttcgaattaaaccacatgctccaccgcttgtgcgggtccccgtcaattcctttgagtttcaaccttgcggtcgtactccccaggcggagtgcttaatgcgttagctgcagcactaaggggcggaaaccccctaacacttagcactcatcgtttacggcgtggactaccagggtatctaatcctgtttgatccccacgctttcgcacatcagcgtcagttacagaccagaaagtcgccttcgccactggtgttcctccatatctctgcgcatttcaccgctacacatggaattccactttcctcttctgcactcaagttttccagtttccaatgaccctccacggttgagccgtgggctttcacatcagacttaaaaaaccgcctacgcgcgctttacgcccaataattccggataacgcttgccacctacgtattaccgcggctgctggcacgtagttagccgtggctttctgattaggtaccgtcaagacgtgcacagttacttacacatttgttcttccctaataacagagttttacgatccgaagaccttcatcactcacgcggcgttgctccgtcaggctttcgcccattgcggaagattccctactgctgcctcccgtaggagtctggaccgtgtctcagttccagtgtggccgatcaccctctcaggtcggctacgtatcgttgccttggtaagctgttaccttaccaactagctaatacggcgcaggtccatctataagtgatagcagagccatctttcactatcgaaccatgcggttcgaaatattatccggtattagctccggtttcccgaagttatcccagtcttataggtaggttacccacgtgttactcacccgtccgccgctaacgtcaaaggagcaagctcctggttgagatgataaggtttataaggaatttgtttgttctaatttttcactcattttgttctaatttcttttaacaaatgttcttttttttttagaacagttatgatatagttagaatagtttaaaataaggagtgagaaaaagatgaaagaaagatatggaacagtctataaaggctctcagaggctcatagacgaagaaagtggagaagtcatagaggtagacaagttataccgtaaacaaacgtctggtaacttcgtaaaggcatatatagtgcaattaataagtatgttagatatgattggcggaaaaaaacttaaaatcgttaaccatatcctagataatgtccacttaagtaacaatacaatgatagctacaacaagagaaatagcaaaagctacaggaacaagtctacaaacagtaataacaacacttaaaatcttagaagaaggaaatattataaaaagaaaaactggagtattaatgttaaaccctgaactactaatgagaggcgacgaccaaaaacaaaaatacctcttactcgaatttgggaactttgagcaagaggcaaatgaaaaacaagaaaatgcattatctgattattattctttcaaggactagtataacataaaatcgtctacaaatagacaaaaaacctgcacgcttaatgtagatcaaaagcttaacgcaaatgaaatagattgacctcccaataacaccacgtagttattgggaggtcaatctatgaaatgcgattaagctttttctaattcacataagcgtgcaggtttaaagtacataaaaaatataatgaaaaaaagcatcattatactaacgttataccaacattatactctcattatactaattgcttattccaatttcctattggttggaaccaacaggcgttagtgtgttgttgagttggtactttcatgggattaatcccatgaaacccccaaccaactcgccaaagctttggctaacacacacgccattccaaccaatagttttctcggcataaagccatgctctgacgcttaaatgcactaatgccttaaaaaaacattaaagtctaacacactagacttatttacttcgtaattaagtcgttaaaccgtgtgctctacgaccaaaagtataaaacctttaagaacccatattattatggtacatatgaaactgaaaatgaatccattgtaacagacaaagagaaaattatagttttaggctctggtcctattcgtataggacaaggggttgaattcgactatgcaaccgtacatgctgtgtgggcaattcaaaatgctggatatgaagcaatcattgtgaataacaacccagaaacagtatcaactgacttctctatttcagataaattatactttgaacctcttactgtggaagatgtgatgagtatcattaatttagaacaacctaaaggtgtcgttgtacagtttggtggacaaacagcgattaatttagcagataaattagctaaacatggtgtgcaagttttaggtacatcattagaagatttaaacagagctgaagatagaaaagaatttgaagcgttattgcatacgattgacgtaccgcaacctcaaggtaaaactgcgacttcaccaaaagaagcattagaaaatgcacgtaatattggttatccagtcgttgtaagaccttcatatgtgcttggtggtcgtgcaatggagattgttgataatgataaagaattagaaaactatatgacacaagcagttaaagcaagtccagagcatccagtgttagttgatagatacttaactggtaaagaaatcgaagtcgacgctatttcagatggtgaaacagtaattattccaggtattatggaacatattgaacgtgcaggtgttcatagtggtgactctattgctgtatatccgcctcaaacattatctcaagaagaaattgagacattagaagattatacgattcgattagctaaaggcttaaatattgttgggttaattaacattcagtttgtaatagcccatgatggtgtttatgtattagaagtgaaccctcgttcaagccgaactgtaccattcttaagtaaaatcactgatattcaaatggctcaactagcaatgcaagccattatgggtacaaaattatcttcacttggttataaagaaggtattcaaccgtattcagaaggggtatttgttaaagcaccagtattcagctttaataaattgaaaaatgttgatatcactttaggacctgaaatgaaatcaactggtgaagttggtttgcttactttatgagaagattagcagaacgcccacaaaatttatcattagcagttaaagaatttacaacaccagagacattgaaaaaagttggcgttttatcagctattggtatatgtgttgcttctcttgtagggttaactactaagtacttacgtaaataaaatgatataaaaaactgcccacaaaatattaattttgttgacagtctgtacaggctgagaaataaatatatatttcaagttacatttatatttaggcagtcgttgactatgaagtcattctttttcttatagacattagaatgacttacacatgcgtatggactcatgtgttcaaattaagctttagaggtatacatgaactaaagttcatacattagaccgtctaagtaatcaattacaaagacggtcttatgttccaagctttttcatttctagctaagcttgccagggggatgggccccaaacatagagaatttcgaaaagaaaatctacagacaatgcaagttggggatggacaacgataaagaaatactttttctttagaaattagtatttcttatgcatgagtttcactcatgtattcctattttaaagtacacattagctgtggctaatgcgtaagaaccactacatcataaatgattagtggttctttattatttctgtcccactcccttttcattatgcttcttttttagcaaagtgaatattctttaatgtaagggtaacgactaatcctagaaatccaatcaaggcacttgtgtcagtcacggcgtgtacggatagatgtgatacgactaaaccaccgattatgccacccattccgatacctgcgtttaagctagacatattccaactcatcacctggcttgtatctccttcaacatgttctatgagaccactctgcactgcaggattcgtactccattgcataatattccaaacaaataatccgattaatagcatgacagtaccgtacgtatgatgcctggtcaagaaccaccttatacacgtcttattgattcagcacgtagacaacctgaagaaacacgtgaaaatatcaaaggttctattgttggattcttcacaccagaattgttccatggggtgggttcagcaggattccacattcactttgctaatgatgatcgcgactttggtggtcacatattagattttgaagtagataatgttaatgtagagattcaaaactttgaaacgtttgaacaacacttcccagtagatgcgaaatcatttactgacgctgaaattgactatcaagatattgaagatgaaattagagaagctgaataacaaaagttaatcccaaaggcgatagataatgtcgcttttgggatttttttatgaattgatattcaattataaatctttggtttctgtaaatttaagatgataagcctttaagaaagtataaactgtatctagataaggcgtgttaagtttatgaaatctagccttttgatagatatacccctgaatagcttcaacctctaagggttgctgatttaaaacatcataatacatacttgttcccatttcatcaggataaccttgataaatcttcataatgtcatcgagtgtctgatctggaaaatgaatcccctcagattgagcaacttgtaacccatcgttaagaatagaacgacatatttctttcatgtgtgctgattttaatattttagcgggttgatgccctatagcagtaattgaattaattcccaagttaacaagaagtttataccaaagtttgttttggatatcactttccaatataagttcaatcttagaagaagaaagctgttgttttaacttacgaatatttggtgtgtcttgtaaatgtaaacgataatcattcaaattaaactatggaacagaaatagaaaaagctatcaaagatatttgtgtatgtttaaaagacggtactcattatacgtcgcagcaaatgcgttttatcgcaattcaatatttgttagataatgcgcaaatttgtcaaacgttaaatcagacattgattcaacaattagaaccaattaaatcagcactttcacaacaaatcacattatctatccgtgatgatatagaacaaaaacgtaatcaatatatagaacaaatactaacagacgtcgtgacatatccagatgaagaaaagcaattcttttcatcaaaattagacaaaatactaattaataaatatataggcatgcctattttcctgggtattatgtggttaatattccaaattacttttacctggattggtacaccattatctgatcaattagatgattttattggaggcaccttaaccgattgggttaaagcgggcatgcatcaaataggcgtcgtaccatttttacaagatttaattacagatggaatcattgcaggtgtaggctcagtacttgtatttgtaccacaaattatcgtattgttcttctttatttcattgcttgaagattcagggtatatggctagaatcgccgtattaatggataaattaatggaacattttggcttaagtggaaaagcatttataccgatgatcattggttttggatgtaatgtgccaagtattatggctgcacgtagcattgaaaatgagaaagaaagattatcgacaattttaattgcgccatttatgtcatgttcagcaagactacccgtctatgctttatttgtaggtgtcttctttaaagaacatcaatctttagtggtactcagtctatatgtgttaggttcattacttctctgcgatagaagtttaactctctattcatgtgctgaacgatatgaaatctatcaaagattatagatgcattaggaaagagctttttaaataagaataaatagggttcaaacatatcaatggtaattgttttaactttaagtctattttttcgatcaaagcgttcaaaataagcttttaaataacccgaagttctgttttctaagacatctagaacttcatgtgtgtcattgttaataaatataaaactcattaagccagtcacactctttacacttctaaattcatccattgccaaatgttcaggtagattatcgaaaggcttgataagtaaagtattgactgctttatttcgaatacgacgtactgtagatggagaaacacagttgtcttctgcagtatctatttctgttttgactttcgtggcttcttcaattattttttgattcacataattagaaataaatcgtgtcttatctacgacatcagtttcagcagtaaaagttgtattacactctaaacacttaaagcgctgtttggctaagtttagatatgtattatagccttgagttttaagcaaggtaatacgagaaactcgtttaccatgcttatgaatttgtccttcatttttaattccgcagcaaggacaagccgaaggcttatacgtaagtacagcattaacaaccgtagacttctttccttttactattacatcattatatggcttctctgaagcaggtaataaaggttggggttcaactgaaattgttacaatgtttattattggtattgtgtttattatcttatttgtcattagagaattaagaatgaaagcaccaatgttaaatttagaagttttaaaatacccaacatatacactaacaacagttattaacatgattgttatgatgagtttatatggtggtatgattttattaccgatttatttacaaaatctacgtggcttctcagcgttagattcaggtctattaatgcttccgggtgcattagtaatgggcgtgcttggtccagttgcaggtaagttacttgatacaattggtattaaaccattagcgatttttggtattggtattatgacatatgcaacttgggaattgactaagttaaatatggatacaccatacttatcaatcatgggtatttatgtcttacgttcatttggtatggcatttatcatgatgcctatcatgactgcaggtatgaacgcattaccagcgcgtttaatttctcatggtaacgcatttgtgaatacgatgagacaattagcaggttcaattggtacggccattcttgttactgtaatgactacacaaacaacaaatcatgttgcagcatttggcgaagagttggataaaacaaatccaatggttcaagaccctttggacaaatgattaagtttgtcatatttataagctaaaacaacatgatttacatatttagatgtatcgagtttgataaaatgtcctttaaactgaggcatactatttttaacactttctgggacataagtaatacctaatccttcattaactaatcttaatgcattatccacactcatggtctccatcgctatttgtggtgttataccataatttcctagaatttgatctgtaagatgtcttaacgccatgttaggtttcaataatataaatcggtcatttttgatagcatcatgtatgtcttccgcatttttatagtcaccttgttgtcctaaatgtaatacgtaatcaggtgttaatgctaggtaaatcgcttctgaatataaaatatcatatttaaaagtcccttgataaaacggtaatatcgttaatgcgatatctattttattatctataaggagctgttcaattcgatgtgacggctcttctattaactttaattctatacctggataagcttttataaattcaggcaatatatcgtaaagtgtatgtgctgctaatataggattcacacctattactaatcttccctttttcaatgctgagatattctgtaattcttgcttcatttctttatatgtatatttgcattagggctccgctatcaccaagaaatattttagctgggtgtgagttatagaataagaatcctaataaagatccgattaacacacaacaaatcataataataaagatattcgcctgtaagatagcaataaatgcaattgtcattaatgcaatcgcagatacaccagatgctaaaccatctaacccatcaattaaattaatagcatttgtaatagctacaatccatatcactgtaattggaatacttaaaattccaaaatgtatcgttggacccattggtaatgaaataaaatcaatggtgatgccataaaatgctaccactaaagctgctacgatttgcccagctaatttgatatatggtttaagatcaaatatatcatcgattaaaccaacggcatacatcaagattgctccgattactaatggtttcacttctctttctattggatggcctaaccacattccaattaaaaatgagaataaaataactgtgccacccatgactgaaatcggtttggtatgcaccttacgaaagttgggtttatctactaaatttaattttttagacatcgcaataataatgctgtctcttatacacatctgacgctgccgacgactcgttgatgaatatcattattcttcttattaaccgctagcattggtaacgcataactatacggtacatcttgatataaaaactgtttttctctttcaggtgttttaaagaaccaattaatacccatatcaaactttttagaaccaatacctactaaattagattcctcttcgccaacctcgtatttgaaatgatattgtggtaatttcttttctaataacttcatatactccatatctaacccgataaaatgattgtttttatcggtatacagatagggtgggttaacttcggctgaaagtgcgactttaatttctttaggatgtgatttcgttgcatgttgttcattatcattagagcatgaataaagaagagagacacttaatacgagaacggttaacatgagatacatttttatacgtttcacgttgcatcctcctctgttttaatacgttggataaaacgttggatgcgttcattattaggctgacttaatacatcgttaggtgtgccttgtttaatcaattcgccattatcaataaataaaatttgatcggcaattgcttgtgcaaagctaatttcatgcgtctgagagatgaaggtgtcgaagttgtttatttagaacacctagctgcagaagccattgcagatgcctcagttcgcgaacaatttatcgacgacattttaaaagaatcacaaaagactgtcctcggtcatgaaaaagaaattaaagaactgttcgcgacattaaatgaccaagaacttgtagaaaaaattatggctggtgtacgtaaagaagaaattcaattagaaacgaatcacctcgtagaatatatggatgaccgctatccattctatctcgatccaatgccaaacctttacttcactagagacccacaagcatctgtaggtagaggaatgactatcaaccgtatgtattggcgtgcccgtcgtcgtgaatctatcttcatgacatatattttgaaatatcatccaagattcaaaaacgacgatgtcccagtttggttagatcgaaattcaccattcaatattgagggtggcgatgaattaattctatctaaagatgtacttgcagttggtatttctgaacgtacctctgcacaagctatcgaacgcttagcaagacaaattttattcgatgatcaatctactgttcatctactaaactttgtaagtaacttaaacttgcccaatctttagctatactattcattctattttttaaactatgatactcatgacgtaattgtgttaatgtcgtatctgtttccatgtgattaatttgagcattgagatcactaacttcagcttgcatatcaagatattgttcattatattgatcaacttgctgtgctaataattgattttcttcatttaactgtgctgtcgttttatcactcaattgtgaactagcatcatatgagtaattttgattttcaagatattttgttaaatcattgaaacgcgtcaattgatttgtatatgtttgatacttttcatgatgttgataatattcttcttcagttgagacgccgatatgattaaataattcgttaatcgtttgattattgtcgtctaagtgtcttcgtaactgtgataactcatcatttaataatttactttgttcagtatttttatgccatttttcattactatcctcagcattcttaagccattgtttcacatcatggaagaacgacattttgttaaaataagtaaattgtgattgattaggtttagggaacattggtccagaagctagtattcctgttatggaaggtaaagccgtattattcaaaagttttgctggtgtgaatggtgtgcctattgcacttgatacaacagatactgaggaaattattaaaacagttaaattaatccaaccaaattacggcggtataaacttagaggatatctcagcaccacgttgttttgaaatagaagaacgattgaaaaaagaaacaaatattccggttttccatgatgatcaacatggaacagcaatagtaacaatggcaggattaatcaatgcacttagaatcgttgataaagatttatcagatatcaaagttgttctaaatggtgcaggtgcagcaggaatagctattgtgaaattactatattcttatggtgttagaaatatggttatgtgtgattcaagaggtgctatatttgaaggcagaagctatggcatgaatgatacgaaagaatatgtcgctaaatggacaaacaaagataaaactgaaggcgagcttagcgaagtcattaaagatgctgacgtatttataggtgtatctcatctcaatatataggtcatcgtattggcatcaagaaaaagccaaaaagcaaagagtaatacaacttagaatttagatgaatatgatttaaggactcttttgtgccttgttcttacttagattactttgtataacatcacaatgagtccttattttttaacaaattgaattacctatagaaaggaatggacatatgttaagtattaaaaacttaaccaagatttattcagggaataaaaaagcggtagataatatttctttggatattcaatctggtgaatttatcgcttttattgggacgagtggtagtggtaaaacaactgcactacgcatgattaatcgtatgattgaggcgacagatggacagattatgatgaatggaaaagatgtccgtaatatgaatcctgttgaattgcggagaagtatcggttatgtcattcaacaaattggtttgatgccacatatgactattcgagaaaatattgttttagttcctaaacttttaaaatggtctaaagagaagaaagatgaaaaagctaaagaacttattaaactggtagatttaccgtcttcatcttcaagatcttctagaccacctaattgaatttcagtgcgacgttcatcgccgaaacgctctttaatttcagtcaattcatcacgaactaattgtaatagtacttcttcatcagctaaaatctcttctaactctttaatatattctagaagttcattatactcagattctattttatctctttctaatccagttaaacgtcttaaacgcatatctaaaattgcttgagcttgacgttcagttagtttaaaacgctcttgtaaacttgccatcgcaattttatcagtgtccgattcacgaattgttgtgataatttcatcaatatgatctagtgctattcgtaaaccttctagaatatgtgctcggtctcttgcttttttaagattatattcagtacgtcgtctaaccactgttttttggtgttctaagtaatgaataagtgcttcttttaaattgattagtttaggtctaccattcactaaagcaatcatattcacaccaaatgaggtttgtaatggcgtttgtttatataaattatttaaaataacactcgcatttgtatcggaccagatatttggagagcagcaagccgcgtattagacgctgctgttgaaaaagcttataacggcgaaaaacaaattgaatggaaagaaatcttagcaggtcaaaaagcttatgacgaaacaggcgaatggctgcctcaagaaactttagatacaattgaagaatatcttatcgcaatcaaaggacctttaacaacaccaatcggcggaggtatccgttcattaaacgtagcattgcgtcaaacattagacttatatgcatgcttacgtcctgtacgttggttccaaggtgtaccatcaccagttaaacgccctcaagacgtagatatggttattttccgtgaaaatactgaagatatctatgcaggtattgaattcaaagaaggtacaccagaagttaagaaagtgatagacttcttacaagatgaaatgggagcaacaaatatccgattccctgaaacttcaggtatcggtattaaaccagtttctaaagaaggtacagaaagattggttagagctgctatccaatatgcaatcgataataaccgtaaagcagtaacggagtatcttatagaatgaaaaaagcaatattaagcgtttctaataaaagtggaattgtagagtttgcaaaagcattaactaatttagactatgaactgtattctacgggtggtacaaaacgtgtattagaagatgcgaatatcaatattaagtccgtgtcagaattaacacaatttccagagattatggatggtcgtgttaaaacactacatccagcagtccatggtggtattttagctgatcgagataaagaacatcatttagagcaattacgagaacaacatattgatttaattgatatggtagtaggcaacctatatcctttccaacagactgttgctcaacctgatgtaacagaaactgatgcaatagaaaatattgatattggtggacctacaatgttaagagcagctgctaaaaactttaaacatgttacaactatcgtacatccttccgattacaacgaggtaattgagagaattaaaaatcatcaattggacgaagcatatagaaaatcgctaatggttaaagttttccaacatacaaatgaatatgatagaaactaataacttctaaatcgacatgctgtcctatcaatttcttagcattatcaacaacaaccatagtaccatcgtctaaataaccgacaccttgtcctggctcttttcccattttagtcaataagatatttaaatggtctccttggtgaacattaggtttaatagcttctgatagatcattaacgtttaacgcacttattccatgtacatgacaaactttattaagattaaaatctgttgtaataatgtgtgcgtggtactgttttgctaatttaatcaacaaagtatctatatcactatgcgattttgttgggtgaataacacgtgttggataatctaaatcatatatttgattaagtttatctaaacctctttgtcctttttcacgtttaacactatcattagcatcagcaattacttgtaattcattaatcacaccttgtggaataagcacttctccgtccataaatccacaattcataatatctataactcttccgtcaatgatggcacttgtatcgatgattttagggattgccttaaacgaatggaatttaacgatataactgtagcgagtatatttgttaatcctttacaattcggtccaaatgaagacttcgatgcatatccacgtcaaattaataaagatgttgaaatgatggaagaaattgatgtagattatgtcttttacccaagtgtagaagaaatgtaccctgatgaattaggtgtaacgttgaaagtgggcaaattagctcatgtattagaaggagctcagcgaccaggacattttgaaggtgtcgtaacagtggtaaataaattatttaatattattagcccagactatgcttacttcggtaaaaaagatgcacaacaattggctattgttgaaaaaatggttaaagacttcaatcatccaatagaaatcattggtgttgacatcgttcgtgaaaaagatggactagctaaaagttcacgcaatgtatatttaactgaagaggaacgtcaggaagccgttcatttaagtaaaagtttgaaattagcacgcgatttatataataatggtgaacgcaatagttctgttataatagatgaaattacacacatccttcagtattagaagtagtaagatatttagctgaaaaagaaggtttcgtattaaaatatgtcaatgttaaatcaaatggtcagatagatattgaacatttgaagtccatcatgaatgaacgtgtaggacttgtaacatgtatgtatgtcaataatattatgggtcaaatacaaccaatacaacaaattgtcgatgtgctaaaagattaccctaaagtgcattttcacgtagatgcagttcaagctttaggtaaaataccattagatttagaaggtattgatagtttaagtttaagtggtcataaatttaatggtttaaaaggacaaggacttttaatcactagaacagcgcataatatcgaacccattatacatggtggaggacaagaatttggtgtgcgcagtggtacagttaatttacctatggcagtatctatggtaaaagctattaataatgcagtgaaacagacggatgaattgcatcaaaagctgtctcttatacacatctccgagcccacgagactaggcatgatctcgtgtgcatctcttctgactatagccaggaatggatctccacttttaagaagttttgtaattaaactggactcatgcagagaatccaagatacttttcccatctcaaggacaagtatctatcacatttcccatctattacatttgtaaacttttttttttttgagacagagtctcgctgtcgcccaggatggagtgcagtggtgcgatcttggctcactgcaggctccgcccctcggggttcacgccattctcctgcctcagcctcccgagtagctgggattacaggtgcctgccaccatgcccggctaatttttgtatttttagtagagacggggtttcaccatgttggccaggctggtcttgaactcctgacctcaagtgatccacccgcctcagccttccaaagtgctgggattacaggtgtgagccaccatgcctggccttattttaatagtttttggggaacaggtggtgttgggttgcatggagaagttctttagtggtgatttctgagattctggtacacgcatcacctgagcatgtatagccacctggtagaccattagtgccagcttcacatcccatggaacgcactaatactttgccaacaagctgatttgttgatttctcaggttgaaggaaagcataatttcttacattttgaatatgccactcaagtttaggtgcgttggttaataccttaacgtggttgtctttaacgataagtagtccgttatggggttccactgcaactgtatgtcctgacgcatcagtgattataaaatgcaggggtggaactatatttaatgtagtatttttttcattcataatgttgatgtttttcactttttgtttgagttcttctatacttttaacgaagccaagcacccacactataaattcttcaggtgctaaattgaaatagccataccgtctatggttgctatatgaagcttcaccagtgaaataatggtttgaaattgccactccatgttcattgatgccatcaccaaagcgatatcttccgacttttaaattagtgcctacgaaaccgtattgaagtgatgaatttgaaattggacaacgtgtgatacccaactgtgcgtatcccgaccctccttttccaggggtggcacctggagcagtcacaaacgaagcttcaaaaggatggctcagattacataaatcaaagcttatcaaaataccagaacatatgaataacgcagttgcagcaggcttctcaataggtagtcaaacttcaataagcatggtaagacgcgtaaatcttaagcagaatgaacgtgcactagtactgagcggtcgctctaatacgtctatgtttattattgataacttaatcagtaaaggaatcgatacgacaatattaactacatcggaatggacgcctgaagaacaagcactcattcggccagctaaattacaaaaaatagataggaacatgcagaagtgggaagaagacttaggtgaatttgacgtcatatttgatccttattttgatttacatttagaaaaagcagtgaatcaaatgaaagtaggcggacgctatattacatgcctaaacgagcaccgtccataaaaagggggagtttatgttttcggcaaacgttagatagtgcttccaattctctttttgaatataatgtaccgtattcagtaggatgggaaatgtataccataccaggaaagaccatatgatcacgtttaaaatcactattaaaggtttcaatataatcttctacacctttggcattaatttttccttctgatgaagagattgttagtactttatgtccactatattcaattgcaccaccttcatgtactgcaacatgaccagtttcggctgagataacaccttcatagctttctaacatggagttaatcacgacttgatttgtttgcgtacctcccactaaaaaacgaatcgttgcatcaggacatttgattttatgtttaatttgttgcatagcttgatcagtaaattgatcaaatccatatcctggagcttgaattcgatttgtttcaattaaacgttgtaaaactttttcatgtgccccttctaaattaagagacagaccgatgacagcaacatctttattttcaaataaaggtccgtcacagtgagggcagaaagccacgcctttattgattagacggtcttcgcctgggatgtttagtttacgccaacttgcacctgtggaaatgatgacagttttactttctaaaacagcatcattttctaaagttacgcgaatagctgaatctgttttttcgatatttgtagcacgaataccagtcattgtatcaatatcatattgtgcaatatgttctgcaagatttgatgagaactctgaacctgtcgtttctttaacagtgatgaagttctcgataccagcagtatcattaacttgaccaccaattcgatcagcgacaatacctgtacgtagccctttacgtgctgtataaattgcagcactaccacttgcaggtccgccaccaacgattaacacgtcataaggatctttatcgttgaattcagaggcatcttgcgtgcttcctaatttagttaaaatgctttattctggattattgcaggtattatgttattagttagaaagaacaaagataaacatgatgtagatgacagagatgatgtccacaacaaacattcaaaggataagcattatgatgatgcaaatcatttacatgatgaaaacagtaaacatcatcacgatgttgaagagagacatgaccgtgacgtagaaggaagagacccacgtgatgaattcgatggagatcgtagagaagacgaccaacatagagcagaccaccatgatgtagaccgtcgagatgccaatcaacaagacacagaccgtcgattcgaaagtacagatagaagacatgaccgtgacgtagaaggaagagacgcacgtaacgaattcgatgcggatcgtaaagaagatgaccgtcgtgatgcagaccattctcaagaccattttgaaaatgatgaacataacaaagataattttgtggataaagtaacacgtcgattcaataatgaagataagaaataaagctttataatgattttcttattcttttaaataaaaataatgacagtataatttgaaattatttttatgaggtcagattatttcaagtaagtgatatgtctctattttttttgaaattctcctaataataagccaatgacaactcctgcaactgtaccaaaaggaaatccaaaaataaatgttaaaaaaacaccaaatataaatgaatatgaaattgaatttaagtactttataaaaaaattggtcataattataactccttcaaattgtatttttagttatataatattgctgcatagattctgccgtcagaagaagaaaactttaactctaaaatatctacgttgttgtcaccaaggaatttattaactttgttatctaatcgggacgtagtgcttgctccaaaagagataaaatgcatacttaatacctccaatcaatatagatgttaaataaaaagtaacatatatatataaagtaaagcaaacttgacattatacatatacttcttccatttcaggtaattcagcttttaaagacgcactttcttctttaagcatatccacttcttctttatctgaagtttcttttaacatttcttcaatatcttcaagttcttcttttttagatttataactacgataaacttcaacagttttttgtaaatcagcttgttcttttgaatattttctaagtttatctgaatcattcacgacatcagggtcacttaacatctcatttaattgttcatatcgttcttctactatatctaattgatcaaacactacatttcctccttctcattttcactaggtgcaactatatgatgtgctctacaacgtggctcgtaactttcatttgcaccaaccaatatgatgggatcatctactttcgccggttcaccatttattaaccgttgtgtacgactcgaaggtgaaccacatacagaacatactgcttgcaactttgtaatatgttcactaactgctgtctcttatacttgattgtaggaggtactataactgtagtggttacaggaccggtaagttagagggcttgaactgtatcagttggtgtaactggtgtggcaatggatactgggcctaaggctatatttagtacggcatttatgaatggtacggtgttccatcggtaaagattaggaaaacataaataaaaaatttcggtaagaattgatcagttatctaaagcagatatgaaaaataataatgctacacctaaattagatgtagatccacaaacctatgaagtatttgtagatggtgaaaaaatcactagtgaagctgctactgaattaccattaactcaaagatacttcttattctaggaggcatacaaatgattatcgaagaaattcaaggcaacattgcgaatttatctcctgaagagaaacaaaaacacattgaaaaagtttacttagagaactctgatttagtaaaaagaattcaacgtgtcaaaactgatcacggtccgctaaatatattactttcgcaatgaatcgtgacggcaagcatatcccatacaaattccatgcatctaatgttaaaaaactaccgcattatgatattgctattgtacatactaaagaaaaaatgtctaaatatgctaagcctattcgtatcgcatcagataaagaaatcaatagtctaaaatttaatgcaccactttattcactaggctacccttggcaaaatggtgataatacgaaagcctattacagtcaattaagattcacacaattttcagccaatggtactgaaataatgactaaagatatctttagagcaggtgcctcaggttctccaatgttagatagtaaatattcaaaaatttatggtctacgtacttatggttataatttatggaacaattttactgacaaatatgccaaacaagagatagctggcggtgaatcttttaaaggtaaagcaggtcaatttataaaagataatattaaatattctgatgtgattgaaatagatgctgcgagtaacaacggtgttgacgagatcagaaatattagagataaagttaaatacgcaccaagtgaatctgaatataaggtttatattattgatgaagttcatatgttaacgacaggtgcttttaacgcgttattaaaaacattagaagaaccaccagcacacgcaattttcatattagctacgactgaaccgcataaaattccaccaactattatttcaagaacgcaaagatttgattttaaagctatcagtttagaacaaattgtcgaacgtttgaaatacgtagctgattcacagtcattaccttacgatgatgaggcgctagaatttattgctaaggcctctgaaggtggtatgcgagatgcgctgagtattatggaccaagctattgcttttggagatgaacatttaacattgcaagatgcgttaaatgttacgggtagcgtggatgaagcgtcgttgttgatttcttaatgtaaagattcacatataatatgagtgaatttttgttctgttatttgatttgcatggtttgattgtagattcaaacgttcttggtaatatattttactttttgtcatttttcttagtattagatttaatttttctaattcttgagacggaaggatattttctggtgctgtaaacaaagtattatggacggtttcattacttgcaaaaacaagcatattaaagtcaaaagcactttttaccgcatctagtaactcagaacctttatttaagtctaaataaatatcacacttgttgtataactttaaaatcatttcgtttgtaataattggatacaaatgaacattttcataaacatttatatctaataacttatttgacatttctgttacagctgctatatggaattgataatctgggttatttcgaattagctcttcaattttgataatttgatcagagttagtttctctacattaggcgtatcttctccaccatcgtttagtacttcataatatacatattcatatttatctgatttttgactttccttcgagggttcttcctgctttccagttcccccacaagctgttagggtaaatgctaaacttaacaaactaattaatagtattaaccttttcataaacatactcctttatagtctttaaagtttcataaaaattataacaattgttttttaaattcatattaagatttaaccaaactcaatgatttacaatgttatttaactgcatcatctcataaattaattatgtaatacaaattgttttttaatatcccaaataattaaaaaatgttgagaatgaacattaaaaattcccaacactagttgattacatctatttactttctttaaaacctttgctgactataatattgataattagccaaatcaattggcaaatcataggcgcaagaaatattccttctttaactgttagtccgaaatattctttgaacatccagaatcctgcatcgttcacatgagataaaatcacacttcctgcaccgattgctagcaccacaagtgcgacattggcatctgaagcttgtaataatggcatcacaatacctgtcgtagatatggcagctactgttgcagatcctagtgcaattcttagtactgcagcaacaatccatgcaagtagaattggtgacatatgtgtgccttcgaacattttggcgatcgtatcacctacgccaccatcaataagtacttgcttgaatgtaccaccgccaccaatgattaataacatcatgcctattggataaatcgcttgagtaactgattccatgatatgatccatttttctatgtcttaatatacccattgtaaatatagcgaagataactgcaattaacatggatgtaccagcaatccaaattaaatacatgattaattcgaatcttggacgtactgcaaaacaaatttggcgtagagttgtcctttttttagaaacacaaaagcctgtagaacgaattgaccaaacattggttgaaatgtattgcactcagtatgaaatttatagaaattcatacgaacatcttaaaaaacatggtgaggttcaagaaatttataaaccagttcaagatatgactggtgaaattattgacagacagttccaaggtttcaaacgtaatccaatgactcaaatttactcagatgcaataaaaaaccttacaaagattggttctgaattaggattatctccaaaatctcgttcagagttaatgggattgaatatgcaggaagatgaagaagaaattgattggacttctaagttcggtggtggttaatggataactataaagatttaacagaacgttatccagatgatccagctttatcttatgcaattggtgtacttgacggcactataatcttttttatactgctcaattggtggtaaaccctgagattgtggtgtatctctaattagtatgtaagagaagatggcaataatgatagccaatagtgcagggtatataaagacgccttcaaacccttttaaataaccgaagttgtataatgcagtcatggaaataccccacgtagcaataggtgccattaaacctccgcctacattatgtgctacattccatattgacgttttgcttccgcgttcgctgacactaaaccaatgaactaacacacgtccagatggtggccagcccattccttggaaccaaccaactaaaaacagcatgataaacataatagttatgcttgaagtaaagaatggaataaatcctaataataagttaataattgctgtcaatactaaacctaaagttaagaacatccgagcattacttcgatcgctgacagttcccattacaaatttactaaagccatatgcgattcattaggtttcttaccgggtgacttaaaggaaaaagtagatccttatttaagaccgctttatgatggtcttcatactgtattagggccagaacaaactgcacgatttatagaaagaggcattattgaagttgcaccgctcgcatatatgcgcggacgtacacttgatgatgcatttgttattttagatgaagcgcaaaatactacacatgcgcaaatgaaaatgtttttaacacgtttaggattcggctctcaaatggtagtgacaggcgacatgacacaagtcgacttgccaaaaggcgttaaaagcgggttgaaacaggcagttaatagactatcaggtgttaaaggcatcagtgtccaaacgttagatcaaagcgacgtagtacgccatccattggtaagcaagattatcagccgttacgaaggagatgaataatccgctatgtttacaatcgatttttctgaccatactgatgttaatggattacggactttctttgtgacgatctggaactacttgaaaatgatttcaattgcggcatggaacgccattaaaaatggcataatttcagccattcgcaacacaagtaatacaattcgcgcaatcatcaacgcattgaaaacgtggttaattcaggcgtggacgtttattaaaacaagattgatagctttagcactgtcaatttacaacggtatacgttccgcgtttgttaagacgtcaagtgcgatcacatcaatcattggacgtttgcgtacatggttaatcaatgcatggttattcttaaaaaatagagtggttgccttagcacgaagtttatattcaggcgtacgaagtgcatttaacagcttacttacatcagtagtttatatcattacaaaacttaggaattggcttgtcagcgcatggagtactattcgcagccgcattgtaagttatgcacgcagtctatactctaagtaactaatcgctatgattaatcttcattattttttctatctttatttttatcctttttagatcttctaattaatcctaaaccagctaacattattaatactaatgaaactaatccgcctctatttgtttcatcttcaccagtattaggtaatgatttgtcattttgttgatctgaatgtttttcaccatgttgagtcacttgattatgattgtgttcattttcagaagtgaaattagattctttattcgactgattagaattaatgaattctgaagaatccatactaccactaagatgttgttcacctggattttggtgactaggtttgaatccactaggatccacaagcgaaccttgatggtttgaagaatccgagttgcttgttgatgttgatgtgcttattgagtcagacgtacttgtgctcattgaagtactatctgagtcggatgtgcttgtactatctgaagtacttgcttctgactctagattagtagctaaggttaatccacttacacataaaaacgcaataaagaatataactgtagaaatataatatttcagcaatggcgtcactcctagtttaaaaatccaatcttcaaaacatttaatatattactcttattttaaacttagcaagattttaaaacaatataatgtaaattattttaagttttctataaaattttacattttctttacattttaaaagttaggtttagttgcttggttttgaattttccaaggtaaaaatcttaaatacaaataccccgcgtcaaattaattatgacacggggtaaataaattattttctaggaaataagattactacggttataaactaaatatctttgcgtaactatataatcttttatatcaatttcaagaaaataagagtagcgactgacaaaatctttagagtcatacttaatacgatatgtgtgtctaccacgggcacaataatgaaaatgtaattagaaaagagcgtattatgaaaaagataaaggttattttaatttggacattgattttaattgttaccattttaatgagtttgatgtggcaaattggtgatctgtctgatccatttaaccaaacgattttattgaaagtaagactacctaggttgttagaagctctgcttgccggggcgacattaacattagctggacaaatgtttcagacggtactcaataatccgcttgcagatagttttacattgggtttagcgagtggtgctacctttggctcaggattagctttatttttagggttgagttttttatggatcccattcttttcaatagggtttagccttataacgctaattattgtattaagtttaacgatggcgttatccacgggttatcctgtccgtgtattgattctacttgggttaatgataggggcattatttaatgctttattacaataaaacgtgtcatgagattaatcgataacattagacaatacggacatttaaaagcaaatatatatccagtcaatcctccagagcgtaaaaacatacctaaattagaaatagaagatttcgatttagatcaagctactttggaaaatatctcagctggaatcgtatcagaacactttactgatatttatgataatgcatatgaagctattgttcgtatggaaaaaagatacaaaggtcctattgcgttcgaatatacgcatattaataacaataaagaacgtgtatggttaaaacgtcgtatcgaaacaccatataaagcaacattaaataataaacaaaaaactgaattatttaataaattggctcatgttgaaggtttcgaaaaatatttacacaaaaacttcgttggtgcaaaacgattctctattgagggtgtcgatgctttagtaccaatgctgcaacacacgataacgatttgtagtattcatcgaaattgtctacccattcatcgatgaatgcttgatcttgaaggtcattatcgatgatgtattttgtgacagctgccatccaaactaagtcagtacctggtttaggttgatagaatttgtcggcacgttctaccatttcatgcttacgaatgtcgaagacatgtaatttgttgccgtaaagtttgtgtccgcgtttgattttagatgcgataacagggtgtgcttcagctgtatttgtacctactaaaacaaccatttttgcaatcattaaatcatccgctgaacctgagtcgccgccgtggcctactgtacggaataaaccttttgtcgcaggtgcttggcaataacgtgaacagttgtcgacgttatttgtaccaagttgtcttgataatttctgcattaggtaagattcttcaatagtacctttagatgaagcgatgaatgataatgcatcagcacgtattgcccaagtcacgcatctttttcagactggcaatcagacggtcattgtccctctgatgaagaccgattgacggctcatccagaatatagaggacgcctgataggttggaaccaatttgtgttgccaaacgaatacgctgactttccccacctgaaagggtccctgctgaacgtgataaagtcaggtaattgagtccaacgttattgaggaaggtcaaacgatccttgatttccttgagaaggggacgagcaatgatggcttcattttcagacagaatcaactgagaaactagctccaaatggtctgcgatagacaaatctgaaatttctccgatatgtggtccttgctcaccacctacacggacagatagagcttgatcattaagacgatagccgtgacaggttccgcaggtcagctcattcatgtagaggcgcatctgggtgcgggtgtagtcactattagtttcatgggtactttaatatatttctaattttcttatgaattggtcttgttatcccagtattaccagtttatttaaaagatttaggtttaaaagggagcgatttaggagtattagttgctgcgtttgcattatcacaaatggttatttcaccatttggaggtactttggcggataaattaggcaagaaacttataatttgcataggtcttgttttattttcaatttcagaatttatgtttgcggcaggacagacatttactagtcttatgatttcgcgtgtgctaggaggatttagtgcaggaatgggaatgcccggtgtcacaggtatgattgctgatatttctaaaggcgcagataaagctaagaatttcgggtatatgtctgccataattaattctggttttatttaggtcctggatttggtggatttctagctgaaatctcgcatagattaccattctattttgcaggatctttagggagataatgaaattcaaaaaactgctgaagtattaagtagaagaacaaaaaataaccctatccttgtaggggaggctggtgttggtaaaactgctatagtcgaaggtttagcccaagaaattgtaaaaggtaatgtgccaacgtcaatcaaagataaagacattatatccgtagatatttcctcgctcgaagcaggaacccaatatcgcggtgcttacgaagaaaatattcaaaaacttgtagatactttaaaagagaataaaaatgctatattattctttgatgaaatccatcaaatgattggttctggctcaactggaggagaatcaggaggtaaaggactatcggatattttaaaaccagctttaagccgtggcgagatttcaattattggtgctacaacccaagacgagtatcgtaataatattcttaaagatgctgcacttgcacgtcgttttaatgaagtattagacacgtcaacccggccaaaacattcatgggtgatacaggcagcttggcattaggcggtattatcgcaacagtgtcgattatgctgaatgcggaaatctcattactgtttatcggttttgtgtttgttgctgaaacattatctgttattttgcaagtagcatcattcaaattaaccggcaaacgtatctttaaaatgagtccgctgcatcaccactttgaattaagcggatggaatgaatggaaagttgttactgtattttggacagtaggcctcattacaggtttgataggattatggattggagtgcattgataaatgcttaaatacaaaggattagaaggaaaaaatgttttagtagttggcttagcgaaaagcggttatgaagcagctaaattattacatcatttaggtgcagatgttactgtgaatgatggcggcgacctttccaaagatccgcacgcaaatgatttagagggatcaaacagtctaaacgtgccattcgtaatgactgaatgactgtacattcgtgccaataagtgatgagctcacttagagtaattcatcacatcataacgataatcttacgatacattgtcgtaggattatcgttttctttttgtcgtaaaatgattttttaagttgataaagttcaatacgcttttgcgagtcactctatttagctaattgagttagaggattacaagcgctacacgcttgcataagtcacattaattatcttttaaaaaaagataaaagaggtactgaggaacacagatttagaaatctgcgtaatctcaactatttacctctatataggtaaaattttcgataaatatgcacgtgcaagcaaataattagagataaatgaaacttgcatgatatagtcatgtcagcatataaacaaggagagtattaacacatgaataataaatacaaatctttattccacgcatattacgtctatcccatgtatctgcttttactttgtcgtattcgatataaactttttcctgcagtgctttagctttaaatttcgtttgtagtatatcccaaagtcgaatttgtggttcgatactcataaatgacgatagcttttgagcgttgtcacgactgagatttccaactattgtcatagcgtcaaaacttaatttaggattttgtgggtgcacagaatgcactcctaaccggctattagagtatccggttgaggtgtaatttgtaacttcttgtaatgtgctttgctttgaatgaatttcttgctcttttctactcataaaaaatcgactccttaatttaatttaagaagtcgcccacccgaatatttatcttgatgtatatttaaatatcgtttagtatttaaatatacaaattcataaaaaacaactcatgttttctttttggattgtcgttcacaaacaaccagtaccatgtgataggcttgaaattggctgagagggtggagtttcaatgttctgtctgcacacccatggtagctatgtgcagtgatagatgtgttaattagcttaatagggtaatcatttcatgatacatcaaaatatcatgttgtacatctgaaatatttacaaattttgcttgtcatttataccccagtaaagctgagaataaaatacagcaagcgttctgattaaaaacaaaacaaaactcgtcaacctgcatgttgtgcacatgtaccctaaaacttaaagtataataataataaaattaaaacaaaacaaaacaaaaacaaaaccaacaaacacccttattatttggcagttccttccccaggctgtttgcaccccgttcctgctgatggtggccactggttactgtctccgtgtgtgagcatctggggtctctgattccagatgtgtgaaatgtggacaccttcaataatcatcttacaaataaagagacctaaaccagttccctgcttaccacgtttacgtgaggcatccactttatagaagcggtcaaacacttgttgtaaatgttctggagcaatacctgtacctgtatcgctaatatataaaatattatattgctcatctttacttgcagttactgcaattgtgtcacctggttgtgtatatcttgatgcattatcaatgagattagttaaaacttgatccatgcgatccatgtcataatcccatagaagatgatcattgccagagttaaattccttcgttaatcctaaatcgtctgcttgcatacggtatttagctttcattttatctaaaagattttttattggttgtacttctttctcaaccgataggccatcagcatccattcgtgcaacatttaataattcattaactagacgatttaatcgtttagattcatctaatacggttatgataattatggcgacccatctgaacgtgatgtaacacgattagcacaacatttaggatggcaaggaaaaggttgcgacttcgacgtgttaccccttatttatcaaatcaatgatggtccaattaaatattatgaatatcctaaatccatcattaaagaagtttcaatcgagcatgaacgttatcctaaattgaaagatttaaatttaaaatggtatgcagtacctattatttcgaatatggacttacaaattggtggcattacctatcctactgccccatttaatggttggtatatggttactgaaatcgcagtaaggaattttactgatagttatcgttatgatttattagaaaaggttgcagaagcgttcgagtttgatacacttaaaaataattcttttaataaggatagagcacttatcgaacttaattacgcagtttatcattcattcaaatcacaggttacatattatcataaagcttaaatgtaaatttttaaagctttatgtatagattgtttagaaagtaaatcattttgtaagatatttatcatcatcttatatatgctatagtttcatttttttcagtcttaatgcattcataactacgctaacagaacttaatgccatagcagcaccggcaatccaaggtgctaataaaccacaagcagctattgggatgccagctacgttatatccaaatgcccaaaataaattttgtcgaatatttttaatcgtagctttacttgctttgatagcttttggaactaatagcaagtcaccaccaagaatcgtaatatctgcagcttcaatcgctacctcagctccagtgcctatagccattccaatatcggcttttacaagtgcaggcgcatcattaattccatcaccgaccatggcaacctgtttacctttgtcttgtaataaagagctgataaacaccaacatggtgaacaaattgctaaattggttggtgcaaatgttgaagaagtctataaaacgcttgtattagaaaacgcgaatcatgatcatttcgtttttgtgattccggtaaatgcatcattagatatgaaggaagcggctcatgtggtcaacgagaaaaaacttcaattaatgccattggatcaacttaaacaagttactggctatgtgaggggtggttgttcacctataggtatgaaacatctatttcaaacaacaattgatgcttctgcgaaaaacttagacaaagtatatgttagtggtggtcaacgtggtatgcaaatcatcatccaagtagatgatcttgtagagatgactcaagcgcaattggcacatattacacacgaatagacaaattaatgtgtaatacatatgattggttttgaatgaatagattattcatgtttaattgctgtacggatttaccactaaaattgctgcagcaccgatagtagcgaaaataggctcaacaattgctgaagcttgtccataattaaatgctttccaacgtgttgcacctgcagcacggattggcatagatagtgctgcaccttcaggaatattctgtatgccgatacctatcgctagaccaatcgcacctaaacatgtagcgtgactgttgctagatacaacaccaccgaatgcaactccgatagatagtccttcaggtatgttgtgaagtgtgatagctaacccaagtaatgcattttttccaagagaggtaggcacaccctcttgttgttggtttttatcttgggcattttggtgaatatggggaataatataatctataaccctgataaaaactccaccgagaataaaacctattgctgcaggaagccatggcatagcactattttcactcgattcaattgcgggttgtaacggaatatagtgatgcagcaagtactttattattgagtccaaagacgaatcaatggactaaagatataggagatacgtttgaaattggtgatatatatccgacacttgtcgattcacatgcatttacaggtaacgttttacctacaattgctaaggagcttggtttaaatgaagatgtagccacatttgcaggtggcggtgataatgcatgtggagccattggcgctggtgtgatacatgataaagagaccttatgtagtattgggacatccggtgtgatattaaatgtcgaacatcaaagcgtaacagaatatgatgataatctacatttctttaatcatgcgataccacaaacttactatgcgatgggagtaactttagctgctggatatagcttgaattggttaaaacacacctttttcgaagaagaaagttttgatcaattaatacagttggcaggacaatccttgctatccactgtgtcatgtaataaagcggcaagttctataatcgttgtatgtactaaaccctcatttaaagcgatatactttgctaatgtatgaacccgttctacatgcgcgatatcgtgcccagtgtgatcatctttatgaaccattttcatatagttacatgcgtgtttaatttttaattcattttccataaaagtctccttcacatattaaaaatgtctaggaacaacccagacctttcaatttattatagaattggtgacaataattgagaaataccttctttaaatttaatccaagtactgcgttgctcgtatctttcttctgtaagtctagatgacactttcatatcgttaataaatgcttgcttaagggagcgtgcgacactctcatcataaataaaggcatttacttcaaaattcaatgtgaaactacgattatccatattagcagtacctacactcctacggggggcagcagtggggaatcttccgcaatggacgaaagtctgacggagcaacgccgcgtgagtgaagaaggttttaggatcgtaaagctctgttgtttaggacgaatgtgccttatgcgaatagtatgaggtaatgacggtactaaacgagaaagccacggctaactacgtgccagcagccgcggtaatacgtaggtggcaagcgttgtccggaattattgggcgtaaagggagcgcaggtgggaaaataagtctgttttaaaagtgcggggctcaaccccgtgatggaatggaaactgtttttcttgagtgcaggagaggaaagtggaattcctagtgtagcggtgaaatgcgtagatattaggaggaacaccagtggcgaaggcgactttctggactgtaactgacactgaggctcgaaagccagggtagcgaacgggattagataccctggtagtcgtttataaattcgtgcaatacgattgatatttggatgtccttgaagtggtgatttaattatttgtagttcaccttcatagcgaccattcagatgattatcgatggtaacatctccgggtaatctttggtcgataccaatggcttcaatagtttggttaattaattgtctagattcatgtgaacgtatgatatgttcgggcgaatcaattcttgaatgatgtttagtaaatagtatatttgacaggtcatcattgatacattcagtgacattaacacgcagttcaaagtgtcgttggacacatatttgataaagttgacgcgctaaagttaaatcaaacccagtatctccaataatcatatttgagataccaacacgttctaattcattaatcgcgatacaaggatgctgattacgatgtacctctatggttggtaaccctttaaaaatgggtcctcttaattcagcttttggtgatttaccagtatgccagatattttcattcattaggtctcgaacgtcccaaactaaatgtataaattgttgcaaatgatttccaaataatttatttggcgctttcatttgtaatacatgtgatacatcattgattgaaatattcaattcatctgctatattttttaaacttaacgttgtttcgtcaaaatgctcttgtaattctttagctgtgatttgtctttgttctttatttaatgacacttatatcactcatccttcttaattaaacatctatatctctttatttgtctttttatatgataggctttataataaacggatagttgtccgtttgtcaacaaacttattttaagaaggtgatgtatttgcgacgagacgccctcgagaaccggcaacgcatagagaataaagcgattgaactctttaaccaatatggtgttcaacaagtgagtatggttgggcattacgagaaagtggtcatggtattattgctgcaattgttcaagcaatttctgtcatcggtatgttcactgcattaatcggtatgatgcttgcaggttcacgtctattatattcatttggacgagatggtttactcccttcttggttaagtcaattgaatcacaaacatttacctaatcgagcacttgccatacttacaatcattggcgtagttatcggatcaatgttcccgtttgctttcttagcacaattgatttccgcaggtacccttgttgcattcatgtttgtgtcactagcaatgtatcgattaagaaaacgtgaagggaaagatttacctaagccagagtttaaattacctttatatcctatattgcctgcaattacatttatattagtattgctagtattttggggattaagttttgaagctaagttgtatacactgatatggtttattgcctacggggggcagcagtggggaatattgcgtaatggggggaaccctgacgcagccatgccgcgtgaatgaagaaggccttagggttgtaaagttctttcggtattgaggaaggttgatgtgttggtagcacatcaaattgacgttaaatacagaagaagcaccggctaactccgtgccagcagccgccgtaatacggagggtgcgagcgttaatcggaataactgggcgtaaagggcacgcaggcggttatttaagtgaggtgtgaaagccccgggcttaacctgggaattgcatttcagactgggtaactagagtactttagggaggggtagaattccacgtgtagcggtgaaatgcgtagagatgtggaggaataccgaaggcgaaggcagccacttgggaatgtactgacgctcatgtgcgaaagcgtggggagcgaacaggattagataccctagtagtcatcatattgtgatacaagttgcggatgcattaagataagccctaaaaccaatcctaaaattggacttcctccaaatacacgcatactactccaaccaattaaagcaggtaagaaaatgaaagcggtacttgcgatgacattaattatatttgaaatgtccgcaatttgtgggtacatgtctattaactttttaggaccaaataacccttccatagttaaaatgttattgattcccattaataccccagctgttacaatcgctggtaagattggtataaatatatcccccaataatttaatcaatctttgaattggattcccttttttagctgcagcttgtttagcgtcgtcttttgaagcttcttctgctcccgtttctgctacaaattgtttataaacttcatctaccgttcccggcccaataacaatttgatactgatgatctgctttgaattgtccttttacattttagattcgtttaagtcttttttagcactatctactgaccttgaaaggctttcataattaactttagctttagatacttctctacttaatgcagaaagctcttgttcactggcattaccggatttagataaattgttgaatttatcttccagttcttccacagaacttttagcattttgcattcttgcacttaaagctatcactgtattttgcatttgcttttgtgtcttttgagcgttgtctacattagccttatactgctttaattcgctttccatttcaccataagttttagctaatgtttcatagttacgtacggctttttgagcatttttagaggcctcttctaatttgtcgtttgcttgttcttgagctctttttaaatggtcaacttttttctgtgcttgctcactcgctctaccttgttgagtaagtgttttatttaatccttcaagctcagtcctgtatggatgagccactctgataaagtcattgagattcctgaagggtttgaagtgattgcagacagtcctagtacaaattatgctgcgattgaagataagtcacgtcgtatttatggtgttcagttccacccagaagtacgtcatactgaatatggtaatgacttattaagaaacttcgtacgtcgcgtttgtaattgtacaggcgagtggacaatggagaatttcattgaaattgaaatagagaagattcgtgaacaagttggcgaccgtaaagttttatgtgcgatgagtggtggcgtagattcatcagttgtagcagtgttgttacataaagcaatcggcgatcaattaacttgtatatttgttgaccatggtttacttcgaaaaggtgaaggcgatatggtcatggagcaattcggtgaaggctttgatatgaatattattcgtgttaatgcgcaagacttagtaacaatacttatattaatactcatgatatacttttcagttgagatgggtcacttacaaggttttgccaccgaacagcaggatgaaacatatgtgtattcaatgaatattggtattaatatggtacaatttatggtatttacaattgttcttgcagtgatagctgcagtcattgatttagcaataacaattagttcccctatgtatgaactaaatgagactaatccaaatttaaatcagcatcaattatttcagtctggtatgcgtgtgggtagagagatattagcaacttctgccaacaccatttatttagcatttttcggaggacaattaactttattcttctggttctttaaattaaaatattcatttggacacatcattaattcgaagatattcacacaggaatttatagctattttacttggtggtatcgccgttgcaattagcattcccattaccacatcatttgagaaagttattaaacgtgtatatcaagattacagttttactcaatttgtaatatcagagccttacattgttcatcatcatataaaacgtgatcgaacagaagttatacaagcccgtgaagaagcaagacaattacgtcgttcacatactcaacggccttataatacattaaaagaccaataaacgtatgatagctacattaaatcactacgtttattggtcttttaaattacaattaagctctaggatgaaattgattatacatttttcgaatttgagattttgatacatgtgtatataattgtgtagtagatatatcagaatggcctaacatttcctggacagcccttaaatcagcgccattttcaagtagatgtgtagcaaaggaatgtcttaacgtgtgaggtgttaatgtcttattaatgttcgctttaataccattctgtttaatcaatctacaaggagaactacaaaacactgctaaaataaatcataagtgacataaataaaaggagaaatatttcaagctcagggatcagaataatcaatattgttgaaatggccatactgcccaaagcaatctacagattcagtgcaattcttgttaaactaccagtgtcatttttcaccaaactagaaaaaaactattctaaaattcatatggaaccaaaaaagagcccgaatagccaaggcaattctaagcaaaaagaacaaagctggaggcattatgttacccatgttcaaactatactacaaggctacaataaccaaaacagcatagtactggtacaaaaacagatgttttgcagcattattcacaatagcaaatgcatggaattaacctaaatgcacatcaacagtagaccaatggaacagaatagagagcccagaaatagagctgcactcctacaactatccgtggccgtactggcctgatcgcttcagggcattggtcggcgtcgactgatcaagtaacgtgtgctcgcaattgcgataccgagcaagcagcccaacaccagacccaatgcaataatcagcgcctttttgggcttgatcgggctgatcggcgtttgggccttgcgatcaatgctgacgagccccagcttgcccatgtcggtgttcaggttgccaaggcgaaccacctctgcccgcaacggctcgatatttttcagaaacaggtcctcgttggcacgcttgccgagcatttcgacctgccggttgacctccagcatatgcagctttttgccaatatcggagatgcctttgtcagtgaaatcatccgaggtgcgtttgagcagtgccgtgcgctcagcctccagcgcctgagttcccataaagtagagcgggatgctctgggatgtgatctctgtgcgcagactacccgggtatctaatcctgttcgatacccacgctttcgtgcctgagcgtcagttgggcgccggtatgctgccttcgcaatcggagttctgcgtgatatctatgcatttcaccgctacaccacgcattccgcatacttctcgcccactctagcccggcagttccgacggctgggcggggttgagccccgcgatttgaccgccggcttgccgtgccgcctgcgcaccctttaaacccaataaatccggataacgctcgcatcctccgtattaccgcggctgctggcacggagttagccgatgcttgttctacgggtactctccttccgccgacacgtcggcggccttgctccccgtccaaagaggtctgcgacccgcagggccttcttccctcacgcgacttggctggttcaggcttccgcccattgaccaatattcctcactgctgccgcccgtagggttatacttacagtaaatgtttgagacatgattattactcctttattgtttgcttgatacttattttactaaattaaattaagacatacacgtaattcaattcatgataaaataaaaaagaattgcttatcagggggtaaagagatgacgatgaccattcgataccaaaccacttcccaaccattaacagaggtgagtcgcatagaagacgttccgagtgaagcgaccattgtttggtatgactttgaagatgcaacagagaaagaaaatgaatttttaagaagtcattttgactttaactatttagaaatcgatgatgcgattaatggcattcctcgagcgaaatataaagcttatgatgactatcaatatattgtgtttcacagtatattaacacatgattatgctgctattgctttaaatgttttcttgcaaggtaatacattggtaacatatcatccaagataagaatgaaggtttatctccactttcaaatacatgaatttcagcatttgaatcttcttttaaaagtgtttcaatcacttcataaccagcatgtgatgtaccaacgactacatatttcatgattaaatacctccttaaaactttgtttatctatagtaaaatgcgtaagcattattagaattaatgtttacattattattatttccgttctaattatcgattattcaatttatcattgctataatgttggatttcaaaaaatcgtcaaaaaaagggccataacatagtgatgaaacactatcatatgaccctctatcaataaaatttaaatttataagattatgaagttttttctctacgtttgcgtccgccaattaataatccacctgctagaagtgaagtgccagcgattaaatccatccctccatgtgtgttattatgacctgtttcaggagtaataaatcagagccgacatcaacagtagtaacagatacaacagcgccaacagtaccttctgtaaacccagtaacaagtaatgacacgcaaatcacaggtaaagcagaaccaggatcaacagtaacagtaacgttcccagatggtaaaacagcaagtagtacagcagacgcagatggaaactatgtcatcaatattccttcaagcgaagacttaaaaggtggagaagagttaccagtaacagctacagataaagctggtaataaatctgatgttgcgacaactgaagtaacagatacaacagcaccagaagcaccaacagtcaatccagtaacaagtgatgatacaacaatcacaggtaaagcagagccaaactcaacagtaacagtgacattcccggatggcacaacagcaacaggcaatacagatgcagatggcaattatgtgattgacatcccaggtgttactgaaattcctcatggttggatgatgatagaagctgatgcaacgaatttagttaaaacaagaaatcatcacaaaaacacatttaaacaaaacgaaggttataatctgacattctttgcattctttgtaaaagctgtagctgatgccttaaaagcacatcctttactaaatagcacatggcaaggtgatgaaataattattcataaagatattaatatttcaattgctgtagccgataaagataaattatatgtgccggtcattaaacatgctgatgaaaaatctattaagggtattgctagagaaatcaatgacttagctacaaaagctcgcaatggccaactcactcaagcagatatggagggtggcacatttacagtaaataatactggttcatttggctcagtgtcttcaatgggaattattaaccatcctcaagccgcaatattacaagttttatataaatcaacattcgctaaaactggtgtataaacgtggtcataacccatacttacttctttatccacaatataacgttcaatttcacgacgaatagtagcaccattaggtaaccataaaggtaaaccagcaccaacaagttgactattagcaaacaactctaaatctttaccgattttacggtgatcacgttctttacgttcttccaacatttctaaatgcgcttttaaatcttttttatcaaagaatgcagtaccgtatatacgttgtaacatcttattattactatctccacgccagtatgcaccagctgttgataataatttaaattcttttattttggacgtagatggtacatgaacacctctacataaatcagtgaattccccttgtgaatataaagtcacattttcatcttcaggtattgcatcaattaattctaatttgtatggttctgatattgatccgacattacgtcgtgttatggatgagattgataagaaaccggaactaaaagaacgctttgtaacatcggatgaggcttgggatatgatgacttctaagacgactgtcgttgttgtagatacacataaacctgaaatggtcttagatgaaaatgtcttaaataaagcaaaccgcaaagtagtcattgatcatcatagacgtggcgaaagctttatttcaaatccattacttgtgtatatggaaccttacgctagctcaactgctgagctcgtaacggaattactagaatatcaaccaactgaacagagattgactcgtttagaatcaactgtcatgtatgcaggtattatagtagatacaagaaactttacgttaagaacaggttccagaacatttgatgctgcaagttatttacgtgcacatggcgctgatacaatcttaacggcatttgatcttagaacatatggaaaagcagggtacttgagtcctctatatttcattaaaggcatttttgaggttctgaaagctagctgctgggggaagaagctggtgatagcagagacctgggaagcaatgaggtctgtggcttttaaaactcccctctctgggtcagagcttaatcaccttgcctatgccttttgccaagttgtaagcttctttaggatcttttccctgtcttttactactctcccccggttttcctagctagaaatgggtgcttttagctcaaaagcagatttttgcatgttgtgctgtggattgcatcataaggtagcaagacttccctcacagaagcatttagcacaggtagagatgggatattgtggaaggagatcgtgcctacaaggggttgaaggacagactctaaaattctctaagactcctttctactttatgattcttatccgtatctttatatgcattctttagccttactgacttattttatacccattcactcgcagatttgctgctgaatgttgattttatccctgtatttgaatatgcgaatttctgtttcaaatttatctttcacattattttcaccacattgatttacgttgtctttcaaggcatacgtgattcttatgtctatcctgccggaattttaattattattgtactgtttgcggtcatttatctgtcattgattaattggtctgtaaatccaaaatatcaattttattggagcgactattttgtttggatgttcgggcatactatctttattttcttagtcgcatttattctacgtttcgagaaatacttctggtatcaaaagcgttaatacttaaggttattaccttataatttgagaaaatagataggcagccatacaattaatatatcgaacttatataagatagaacaaagaactgcataattatgataatgaaatagccataccattgtcctaaaacaacattttcgataaactgctttttaaaagaagaagcggtgataagtgattcactataactatagaacaagccgattaaaagatatggaataaaaatatacttaaatcttgaaaaaagataatttatagttactgattcgtaatttaatgttgttaataattgagacaatattataaaactaggggtgccgaaaataaaaatattgcgtatataatattgcaatatgagtgaactatcagacatctgttcattttctaaagtgatttgcgttagtaagtgtgtcacgatgattatgacacaaataaacgcacgtaaatacactaattcaagtttatttttcttcatcgaatccgtcccattcctttattagcgtttcaaatgcatcattacgaagtcgtaacaaggtagccgtatcggaaggtgcggctggatcacctcctttctaaggatatattcggaacatctcgtagagatgatatggaataacgtgacatattgtattcagttttgaatgtttattttaaacatttaaatatttaatgggcctgtagctcagctggttagagcgcacgcctgataagcgtgaggtcggtggttcgagtccactcaggcccaccattaagtattaataatttgggggcttagctcagctgggagagcgcctgctttgcacgcaggaggtcagcggttcgatcccgctagtctccaccattaaatttgtacattgaaaactagataagtaagtaaatagattttaccaagcaaaaccgagtgaatagagttttaaataagcttgaattcataaaaaataatcgctagtgttcgaaagaacactcacagattagcttttatttatttcaaggctttaatcgccattgtccctcgcattatactgattaactgattattgtcatttttaatttcaatattccatacttgtgttgatttgccttgatgaataatggtagcaattgcaatgactttaccttctttaactgaatgaatatgattggcattcatctctaaacctaatggaatatatttagaagtatcaattaagtttgctgcacctagcgagcatgcagtttcacctaaagctaaacttgcgccgccatgtagataaccaaatggttgtttcactttatctgttacaggcattgaaatgacaactttaccttcttcttcaatttcaacattcatttcaaatgtttctaataaattggtcaatctaacacccctctttttatactataataccatggctgcaatcgtaccaaaaataattaatgggatattatgttttaggtcatcatgaatctttacttgattccattttctatagcaagtctcacataaaactttaggttttctataaaaattaatgatagttaaaggttcgttgataggattcaaacattgtagacatcgtttcattaaatatctaaccaacctttttgttttccaagttgattcattttttttatatcttttcttgctaacatcatagataacgacacaccgttgtgataataaatcacattcccgtttggcgcttgcttctttctacccacacgacctgcaatctgtattaatgcttctttagaaaattgatcagcttcaataactacgacatctaacttttccatggtaaaacctcgttcaagaatggtagtcgtaaaaacaactacatgattacctgcccttaaagattgtactttttcaaagcgtcgctcatcttcactgtgtatatataagtttgatttagagcatgctgaaaaacgtatgcatatcgttgaaggtttaatgaaagcattgtcaatactagatgaagttatcgcacttatccgtaattctaaaaataagaaagacgctaaagataacttagttgctgagtttgactttactgaagctcaggctgaagcgattgtgatgttacaactttatcgcttaacaaataccgatattgttgctttagaacaagaacatgatgaattatctaatttaatcaaagatttacgccatatattagatgatcacgatgcattattaaatgtgataaaaaatgaattgactgaaattagaaagaaatttaaaacagatcgtctttctacaattgaagcggaaatttctgaaattaaaattgataaagaagttatggtaccaagtgaagaagtagtattgagcttgacaagacacggttatattacaagatatctactacaagtaaatcacccggttgtacgttgtttacatgcactggaccacttaaaacatgtacacgatttaagttcacgtgtttgatatcacttggatcatcattattggctacttgtccatctgtccaatctaagcattccattctaaaggattctcctggatctactgaaaatgctgctggaatatcaggatgccatcgattgtgtcctggatgttcttgttgatccatcttcttgtttaaatcaatactaaataactttttaggcatatgcccttcccccttacatatgaaagttagttatgactgattatcaagttatctaaatattaacacaattaaagttacaaaatatattaaaatgtgtatatttttattaattggaattattacgataaacaaatgatataaaaggacatgtttgaacattcaaggggaagtagaggtactggtggtacattatctggtgtaggtaaagttttaagacaacaataccctgatattgaaatagttgctatcgaaccagaagcttcaccagttctaagtggtggagaaccaggaccacataaattacaaggtttaggtgctggatttgttccggatacgttaaatacagacatttacgatagtattattaaagtaggcaatgaaactgctatggaaatggcacgtcgtgttgcaaaagaagaaggtattttatcaggaatttcttctggtgccgctattcacgctgctattcaaaaagctaaagaattaggtaaaggtaaaacagtagtaacagtattaccaagtaatggtgaacgttacttatctacacctttatactcattctgtctcttatacacatctccgagcccacgagactaggcatgatctcgtatgccgtcttctgcttggtagtacgggattaggtttatacatggttaagcgattagtagaagtacagaatggtagaattacagctactttccaaaataatcagtttaatatatccattgaatttcctaaatatgcgatttaatatttgccatacctacaatattatatttggttactggttttaaatcatgttttttataaaatgatttagtactttcttgatcgtcagtcatacagacgatttgcattgtgtggtcaaattgactaagaacttctccaagaagcttagaacctataccatggttttgatactgacgtttaactaataaatcttgaattatgataactgaaataccatcaccaacaagtcttatgagtcctatgagttcagtatcatcccataccgataacacatatagtgaatgatgaaaagcttgactgagtttattcagatcataagtatagttgggccacgatcagtacagtaatgttcattaacgcgtttaatgaaacgtaatagccatgatggttgatctggtgctagaaaatctttccatgcaacaaaatgaaaatgaagtatatcacgacattcatcagttttcgtgtttttcaaactgaatcttcgaataacatagtcagaatattcacgacgaaatatagtggatacaataagatgattggccggaaatgcatcaggaaatgataatggttgttcatcatcttcgttattccaatattgtgcacattttattcggccttgttcttcaatgccggtcaacatgacaattatgctaaacgaaaaaatgatgaatataaatcagttcagattattaataattcaacgatatagattcattgaaatcatacataccagcagtgttgttcatagatcatacgccaaaaatccggaacagtctttatcggcagcttgcacaactcgtcgtaccaggggtcacgagtcgagtccatcgaaacctcggtcttcgtattgcgcaccacaatgacgttctcgacggtcggggagaacaccgaatgcaccgcaccaatcttggcgcaggccaacatcgcgaaaaagatctccgggatgcggggcagataaatggtgacgacatcgcccttgcgcacgcccatgaccttaagaacattggccatctgctcgacttctcgattgaaggcgaagtaggaaaggtacgcacctcatcagagttctcaccgacccagataagggctagcttattgcggcggacggtactgagatgccgatccaccgcgttggtgacaatattggtcttagcgccggtgaaccattgaaagaagggcttgttcgagtcgtcaaggaccttatcccatagctttgaccattccagctccaattagtatacctacacacatggctattaaagttactgctaaagtgttaggtacaccttttaatacttcaataatagtatggaaaatgaaagtcacttgtatgtccccctaaacttgatatggtttttctgaaattttacttataatcgtaaacatcccctgaatgattaatgcaagcaaccaatagataatagaaatcacaacatacacctctaacatacctaagccataattatttccaataatcaattgaacttgtcccatcatatctataatgccaatagtgaaagctaacgatgtatctttaattagttcaatgatttgggttgttaagttgggaatactatttcttaatgcttgcggtataatgatatcctttaagattcttggataacttaatcctactgaaagtcctgcttcaatttgatgataatctactgataagtaaccatttatgagcacgcaacatcaaatcgcccaagccttaacgtctttagaaaacgcttacaacccaagcgacgtcgaaaacggcatgtaccaagtgtgggaagacaaaggctactttcagccaagctatgacaaacaacaatcgttttctattgccctgccaccgccgaatgtcacaggctcactgcacatgggtcacggctttaacaatgccatcatggacacgctcacccgctatcaccgaatgtggggcgaaaatactctatggcagcaaggtaccgaccacgcagggattgctacgcaaatggtcgttgagcgtcaattgaatgcccaaggcatcaagcgccatgatttaggtcgtgaaaaattccttgaaaagatttgggagtggaaagccgagagcggtggcaacatcccccgccaaatccgccgtctaggtagctcggtggactggttttgttaataatggattcggcaacactttcagtaattctttttggttccgaataacattaaagcgcatacgtatcggatgtatttcactgagattttcataggtgaacattttctctgtaagataattgaaagttacatcttgaggtttgaaacctgtatatgcagcaatctcttcttgatgttctaatactctgcttttatcaaaacgaagttcttgtgtactgcttacacctgttttgataattactaactttttcttgtttttattggacaaccaaacttctgtttcattttcatttgtatgtgcaatttggtagttcaaatactttacataaaaatatattaatttccaaaattgtttttctatattcatggtgcctccaatttatctagtttcagcaatgataagtcgatctacgacttcatcatgtgcttcttctgtaaatgtctctctttatccaatggtagtactgttaataaactcgcttttgctttatctattgtagtaaggttttcagatttaaatattgcttcaattctcctccttacttttaattctactgtagacattacagcatttaataactctgaatgattcggaaaataatatctaatctgtccaggtgtcatatcagctaatttcgcaatttgtcttacagtagatcccttcactcctttttctacaatggagtcgaaagcgtattgaatgatttgttttttcttttctttatgattaattatttttggcatacctatatgttaacacattttaatacacttgtattaaaaaagtgtacagaatacaaccattttctgtacactcgttttttatgtctaaataagtatgtattacatagaattatgtgttcaaaaacccaacaaataatctatgttcaaataagagggctatttttgtttaaaattattcaagaccattcgctttctaacatactcatttgccataaattataatattctccatttaattttctaaagtctcttttttctccttcttttataaatccaatctttttgtaactttttatagctgatttattaaaggcaaaaacacctaattcaattctgtgtaatcccaaatcttcaaaagcctttttcaataatttctttattattttagggcctaatccttggccacgcatttgcggatcacctactaaaactttacctaaagtggcggaacaatttttaaaatctatattttttcaagcagaagacggcatacgatatcatgcctagtctcgtgggctcggagatgtgtataagagacagcataatacgtgcatattcattaaggtggctatgaatgtcatttgtatgaaaaaccaatgctacagctaaatcttttaaatctaacatatcttgattaagctggttcatgtttgtttctaagcgcattaatttttcaaataattcattacgattcaaaggtggttaaacctccttaattaaatgcttcaatttcttccattttatattctaatggttgttccataccatctattttaacttgcatagatatatctaagatatttaatccgactacttggccattaccatcaggcgtttcaattgagtcacctacgtctggtaattgagcacgtgcttcttcataataatcgttttcatattttaagcaacacatcaagcgtccacatgcgcctgaaatcttagcagggttgagtgacaaattttggtctttagccattttaatagacaccggttcgaaatcgcctaaaaaagttgaacagcataaagagcgtccacatggatccgggcctcgcgttcggctacctcaacgagctgttgacgggcgtgcccgtcgaggagttcgtgacgaacggctggcccgcgctcgtcgcgacgagtgacgacgagcagaagttcgtcctgcaggtcgacccgggattcgtcgcgctcatgtcgacgcgcgaggggccgttcggcgacctcgccgcccaatgggccgccgtcgaagcacccgaggacgccgacgagtgggaggccgacccacgtgaactcggcgagttcctggcccagttcgtcgcgctcgcgctgacggccggcgacgagggcaagcacgtctactgctggctgtggccctgacgggtctgggtgctcgccggcgcgcagccgcacatcggcgccgtagggcgccccgaggtcgtgcaggagcagcgcatcgaagtcgtgtgcccgcggcgcgacgccgtgcgggtgtagaatctatataagagggtgtgtttgaaaagataagagtattctgacttaacacacccgttgctaacaattgaatagcgtgtaatgccccagatgtaatcatgacgttttcactttttatatcaataccgtcttctcgagacctttgggcaataagttctcgtagtttttgataaccgtaaccattatgataaccaaatgataaatctccaatgtatccagaaaccttattcatagcctcccttagatcttgttgaggcaataattctttacctaactcccctttactaatatgaataaaagaagtatcagtttctaacttattaataagttgaactataaattgacttcttgtctggaaggaccactccatcatttctgtccatttatttggaataaattcatcatctaaataatcattaacatatgtgccactacctctttggggatctttgaaagtgcgcgaattttacgtgataaattaccacttaaacgagatgatgaatcagaggtctatttatcgtttttagataccgttaattggtgtaaaaataaattccaagtgacgaatcaagtgtcagtggaagatacatataaagcacgctatgatgtgacaattcttatcaacggtttaccactcgttcaagtggagttaaaacgacgtggtggcgatattaatgaggcctttaatcaagtgatgcgctatcgtaagcagaactacacaggcctatttcgttatatgcaaatgtttattattagtaacggtgtagaaacacgttatatttctaataatgatggcgaaatttataaaagtcatatgttttattggagtgataaacataatcaacgtatcaatacacttagtgatttcacagaatcgttcttaagacgttaccacctgacccaatggcaattaaatcatcatcaggtgcaataacctcacctgtaccactaacaataagtatggcatctttattcattacgataagcatcgcctctaattgtcgtaattgtttatctccacgccattcttgtgctagttcaacagctgcgcgctctaaattaccactaaattgctgaagctttgtctcaaatttttcgaaaagtgtgaaggcgtcagcaacactacctgcaaaaccagccaatacttttccttcgtataaacgtcttacttttctagcagtttgtttcataataacttgttgacctaatgtgacttgaccatcaccagccatagctgcttcaccattatggcgtacagcataaattgttgtagcgtgtaaagaattatccataaattactctcctttttttgctcgaggatgtgcgtttaaatagcatccttttccatttttccaataaattcgttgccaatcacattaaaattagaacctgcttgtgcccccatgtcttttccagtataaggatccgctgcgtttttgccatctttgacacctaaaaagcgtatgccccctacacaatttataaacctgtttttagatataaatgtattttgagattttagcggcgttaatgcatattcttgaatttgatcaaacacattgtctctgatatgaatattttcataatagcgatgatatctacttgcatgtgacccgattgccctattccaaggtttcatttttgggtcatctgaaggtccaaaataacaattttctataatggcatttttagttattgtcccatcggttgtaccaaattttggaaaagctccaggcacttggatatccaattgaatcgcttcagaaaagaatctatcgatatcaatcttcaaatttttaggttttgtttgccaaagcgtttgtgtagcaaagacatgctctacctcactcgttccgataccaaaagctatggcaccaaaagcgccatgtgtagcagtatgagaatcaccacatacaatggtctttcctggttgtgttagtccagtttcagctccaaccatatgcacgataccttgttcatctgatcccatatcaaatatgtgtacaccgaaatcttttgcatttttttgtagcgtggtaatttgcttatttgcaatttcatctttgatattaaaaatatctactgttgggacattatgatctaatgtagcaaatgttaaatcgggacgtcgtaagcgtctattttgtattctcaatccttcaaacgcttgtggtgatgttacttcatgtattaaatgtaaatcaatatataataattgagggtggtattggtgagcgtttagacaaaaagaaactaagacaaattgtaattattaatatcaaataataaaattataaaacataatatttatataataaaatttaacattaaattgtttttgttatcatctttctattatagtagtgattttaaaaaaataatagtaagagcgttaaataaaaaagactcaacactttcgaattaccgaatgtgcggagtctttaaaaaattttatttacgaaaacgatgtctcgactttttaaaatcgtcatcatcttcatatttacgaatttctttctcaagtttatttttcttacgctcacgtcgccatttacgagtaaagaaccacaataagaaacttatgattaaactcattatagctaaaaaggcagcataacctaataaaggttgataagaaatatcatggaaatttggaataaagaatgcatttaggagttgatgtgttatgatacgtatccaatttaaaaccaaaggcattattcaaaccacctattccaacggcagccccttctttacctatctgtcctaaagggcctggtgaaaatgcaaagccaatgccatctccacctgttacaccatcaggagaataaccttcatatctattaccaaggttaactttacctgtaaaacggaagctacggtttgaatctaatcgagtgtttaaagatatggcacccttttgactatatgcgtctggcgttaaggtagcaatacctgttttaggatcatacgtcgcagatccagacagattcatatgttcattaaagttatctttgttcaccacaacagaattagatgtcagacttgaagttgttgtcgtggacgttgttgtcggtgctgccatcgtattcaaaacagtaaatctactagatacaaggaggacaaagcatttgcctgtttttagaacaaaactagaatagtgcctggcacataataagagctcaatcaatatttgtgcataaatgagtaagataatctaactatttgacttagttcctccgggcctcaattttttcatttgttaaaaaaccaaaaggactgataatctctgtatttcttatctcacatagttaccgtaggaacaaatgagataaatgatggctttgtgaaactgacaacttatgcacataaataagggagcagcatcattagtaatagcagcaggtctaagcctaaccttgtgaacttggccaagacatttcaattatctgggcttttgtttcacaacgataaaaggacagggttggactagatgatctgtaagttttcttctagctcaaactaactaagatcttttaaccagtcaacaaagctttacttactgaaatttaacaagctataatcaatatgtagacccaattaagcagtgttaaatacttttaattattttacatatttaatttcaacttgggtatagagttataacgtgattgaattaattaaaatggaagggatgatagttgtgtctaataataattttaaagatgatttcgaaaagaatcgtcaatctattaatccagacgaacatcaaacagaattaaaagaagatgataaaacaaatgaaaataaaaaagaagctgactctcaaaacagtttatctaataactcaaatcaacaatttcctccgagaaatgcccaacgacgaaaaagacgcagagagacagcaactaatcaaagcaaacaacaagacgacaaacatcaaaaaaatagtgacgctaaaactacagaaggttcattagatgaccgttatgacgagtcacaaatgtgttctttgtatttttctttgttggatttattggtttcttcccagattctgttaagtatttaggcactgttttacttgtaccaggatcaattggtacgattctaatttcaataagaaacagtttctatgcttttgagaattatggacaagatacaaaattaccatggatttttctatatggattaacaggtttacttattccagctgcattagcaacagcattaacaatttcagaaggcggatatatcaaagaggtggggaaccatgttgatttagactgggttcaactaattctaagtccatttgcatggtcagttgtattcttggcaattatttcagtcctttatatatcttctggatttcttacattctatgctaataaagcaaaggatgaaccggcatatcatttaatgagacgttggcatatattttctttagtaagtgttaaaacatgcgcatcgtattcaggtaatcctaaatcattaacatatttcgctttacgttcatctggtaattctggaatagtttgacgaacacgctctttccattcgtcatctacatataatggtacgatatctggctcagggaaataacgataatcgtcagatccttctttaacacgcattaaaatagttttacctgttgattcatcaaaacgacgcgtttcttgaccaatctctccaccatttaataattcttcttcttggcgtttttcttcgtattctaatcctttacgaacatagttaaatgagtttaagtttttcaattcagcttttgtaccgaattcttcttggccatatggacgtaatgaaatattggcatcacaacgtaatgagccttcttccattttacaatcagatacacctgtatatatctagtttcctccatggaggaacccctcttggggggaggcaggagagtttgctctgcaaggaaacacagtgtttcatcttgacaaagtggcttctgagtctccagtgcccagcatggtgtctgacacatgtcagcaggaaaagttggctttccaaactgctgattctgtgttacagctttaagctaaattcagaaagtaattaatgttctttcctatttattcgatctcaaaaatgtacactttgcagggcttttctctagaatataatgatgccaaagtcatgatagtgcagaaatgttcatagatggccttatgattaaggatgtttagcaaccaactgtccaaagtggcaaatagatgtataacttgaggttttgagacttatttcctggagaggatcatattcattgactcactcactggtagcccagggctagccgtgaaatccggccagatatgcggctcccaggccttccttacctttgcggtgcataacgtggacgtggtcgtcggcagacgcaatgcggtcggcaatctctccagtaccgtccggcgaattatcatcggcgaccagaacgtcgacgtttgggttggcgcggcgggtccgcgcaacgatggtctcgacattctcgacctcattgtaggtcggaatgatgacaaggaccttgtcgagccggacttcagtgtcggtggcggacattcctctccgatctgttgtgattcgcttgtgcgagcatagcgcgacggcgttgcagcaacgacatcgcgatagcccctgctgtcataacgaggacgatgatccgcaaccatggtgcaatctgtactccgatggtgaggccggattcgagaggtatagtcaccgtgaaatgtgtatggactcccagatcattcaagcgtgcttcattactaccactgcattatatcgggatccattgatccaggctgcatggaatccactgcattcaatcatgctgcattgaatcccctgcattcaatcgggttgcattgggccatgctggataatatccactgcattcaatcggggtgcattgggcctcgctgcctggaatccactgcattcaatcatgctgcatggaatccactgcattcaatcatgctgcataaaatcccctgcatttaatagggttcaatttctccatgctgcatggaatccactgcattcaatcatgcttcattgcaaccactgcattcaatcgggaaccatagggccacgcttcatggaatccactgcattcaatcatgctacattgcaaccagcgcactcaatcgcacaccatagaaccacacttcatggaatcgggttacctgatttattaagaaaacaccaaattaaagtgtttgggcctaatcgtgatgcggcacaaatagaaggctcaaaggcatttgctaaaagaataatggctaaatatgatatacctactgcacaatataaggaaattgatgacaaggatgaggcattagattttgttgaaacatgtgatttgccaatagttattaaaaaagatggtttagctgcaggaaaaggggtagtgattgctactgaaagagctgaagctagagaagcagttcaacaaatgtttgatgaaaattcaggaacgattgtatttgaagaatttttagaaggtgaagaattctctgtaatgacatttgttaatggtaagagagctattccatttgattgtatcgctcaggatcataaacgtgcttatgattccgataaaggacccaatacaggtgagcttagccttttctctaggatcttcggcttcaatgtcaaaaatgttttgaaatagctctaatttttcagtacttttcttatcactacttaattctttagcctgtttgattggatctttcaacatttgattaataatactttttgtatgcttagaaattacttttctttctctttctgaaagatgaggtaatttacggtcaatactatccatcgtttctgattgtatatccatagctttatcacgtaatgctcgaatgacaggtacgacacctaacatattaacccattcattgtgtgagtcaatttcagctggaatttgttgtgcaatcgtttcagctgcaagttgacgttctcttaaattagcgtcaactaaaccttttaaatcatcaacatcatagttgaaaatattagtgattgcatcgatacctggttcaatatatattatataatgaaacagttacttatcttagttaaatgggtttgtagctgtttttttatgctataaacattgaaaaatttatgaaagggggatatgaaaaatgtcgatgatgcgtattgttactttcatatttagtgtgtttatcgttggtatggtcgagatgatggtagcaggtattatgaatttaatgagccaagatttacatgtatctgaagccatcattggccaacttgttacgttatacgctttaacatttgccatttgtggaccgattctggttaaagtgacgcagcgttttaaagctaaatcggtgttactttggacattagtgacttttattatagggaatttaattatagcaatagcgcctaatttcactattttagtgataggacgtattttgtcatctgcagcagcatcactcattattgttaaagcagttaaaggtttcgcgacgatgttactattaggtattctaatgatattcgttacagctgtcttcttgtcacgtggactattatcattattagtatcatctaacttctttaagaaaaaatattggttatttggagttaagaaaaaagatcgccatgacattaatgaaggtaaagatgttcatgaccttaaaacatcatttgaaaagtggaatttcgttaagttagcaaaaccgcttatcgcgttaagtattttaatcgtcatagttggtttagttattttatcaatttttaaacttaatttaggtattgatttctcttctggtacaagagcagatattgagacaaatcaatcactcactcaaggtaaagtcgaaaaagctgttaaagatgtcggcttatcgccagaccaagttcaaattaatggcagcggtcataaaaatttgacaatgttcgccaaaattacaaatgcacatacctgctgatgtagcaatctcacgtttaggaatctgtcctacagatacacgcggacatgcatgaaatgacaatgcatataataattcactggagggcaggttgccacagcaaagtctagaaacaacctattaattgtagccatcaatagggaaagttgctaataaattctggtacattcatataaccaaattctcagaagccataaaaaagaaaaacaaagttctgcaggtacagatatacaaaaatctgtctctaaggtattaagctcaaaaaacaaggaacagacaaagctataaactgccatttatgcgaaaaaaggggaggccagtgggcacaagtgggaagcaggcttttctgtgtccttttgaaccctctgaatttggaaccatgtgactgtaatctatctaattatgtccttggcttgaattggtgggataattttcaatcttatgtttatagctattattaatctttaacattactgtttgctttatcgacaatacgttgacgatatttaaaaatgttgctcactaatgttttgattacagcgtataatggaactgcaacaagaatgagtgtgaaaccacccaaatctccagctgcaagtatgacaacaataatagttaatggattaatgcttaatgatttacccattacgttaggagttatcacgttaccttcaagttgttgtgcgattaatgttacgacacatacccaaataaaagttgaagggccatcaataatacctagtatcgctgccggtgcaaaagataaccatggacctaaaaatggtattaagttagctacgccggcgaataatactaataaaggtgtatatggtgcctgaggacatgatcgagttcggtcgaggcgcgcacaagcgcggtattaaggtgatcatcgccggtgctggcggtgccgcccatctgccgggcatggtcgccgcgctgaccccgctgccggttatcggggttcccgtgccgctagcccacctcgacggtatggattccttgctatcgatcgttcagatgccaggtggtgtgccggtggcgacggtcggcgtcggtaatgccaagaacgccggcctgctagcggtacggattcttgccgcgtcgacccctgagctgtgcgaggccatggtcaagtaccagtccgatttgcacgatgtggctgcgggcaagggcgagaaagtgcgtcggcactcctgtccctgagcgactaccgagagttcattgctgagctggcccgggattgggccagctacgacccggccattagatcgttaccattttcaactagaatatagttccaaccataggcttcgaaacgctgttttgtatcttcagaaaatgatttatctaaatctccatctaaagatatatcatttgaatcataaaggacaattaatttatctaactgattatgacctgcaaaagatgcagcttcatgtgagataccttccattaagtcaccatctgacgctaatacataagtgtaatgattaactatatcaaattggtccttattaaatttacctgctaaatgactttctgctaacgccatccctacagacatggcaaaaccttgacctaatggaccagtagtaacttctacgccatcagtatgtctatattctggatgtccaggcgtcttcgaaccccattgtctaaattgtttaagttcttcaagttctaaactaccagagacatgtaatatcttttcatcgtcactcattaaactagaagaagaaataggttgtggcattgaaccatcattcatacctacaagatagatatgctttttattatctacttttgctaaatccatggtaccaatacttacttggtctaacgtttgtggaatcataacaaattctaattgttctaaccctatatcaaacacttctaagaaacgggataatgacatattttctttctcaaagactgtcactaaatcatctaaaatctgtattaatccgttccaaatttgatcaatttcttcagcttgttcatgataaccatcattatctagcatatctctctcagtcatcaaatgattcggtagttcaaaatattccatactctcataaaatgccgtctcaaaatcacgtaccgttttcccttcattcatggcttgttcaaagtgtaaaattgtcttgttcaatagacccactttctttgatgtctgataacatcggccgtttattttgtctgctttccgcacctcgtccgatttgagccactaagatgataacagcttgtgattcagttgcgattgttttgagttctcttgatatttcttcaatctgttcacgtctgtctttgcgtgtgtttgttgatttcatgatttgaatatagtcgataacaatgacctgctgacgttcactttgtttcatggcctgcattctgatttcatcaaccgtcgtcagtgcgctatattcaatgtttataggcaatttcttgattccgtccagtgccagcataatatgattgatgtcttgctctgataactctttagggtttttgaatttggtcaagtctaccccactaagatttgccgacaatctttcaataacgccacgccctgatgagctcgtgcttgggcagtagctggaaatggtccagttgttattgaagcaattacaaaccgtttagaaccacactcaacagctggtgatgacccacttcgctatcgtactaaagaagacattgaagcttggtggaaaaaagaacctctcgttcgtatgcgtaatttcctgactgaaaaaggactttgggatacagagaaagaggaagcttatattgctgaacttgatgcaggtattgatgccgacattaagaaagccaacaatgttgaaaaacaaaaaatttctagcttcattaaaaatacacttgaagtgccaagccaagcaatggcagaacaaattgcaaaatttgaaagcgagggcaaataagaatggcagtaaaaacttatattgcagcaattacagaagcgcttgatttggcgctcgaaaaagataaagatggtcttaattgttccctgatcatctatgtaccccttaaaatatcacttattaatgaaataatatcacaaaattataaaaagtgaccaaatatcatttggtataaataaaaaagtagtgctattggagtgatgtgtgctattgattacatttgatgttgtaggggatattaaattaatataaaaaataaaaccttcatccgatagattgatgaaggtcagtacgttgctattttcgaattaaagctagaataccagcaactaaaattaaaatacctgataagataccaaagaaaccgataaagatgaagtttaaaaggccaccaataactaataaaacacccattaaaactcttttcttattgatgatacaacttaagattaaagtgataatacatgtaaggatgacagcgacacctagtccgaaaacttgtccaccataaatattactcacagtgtctctactaatgtttactatgctagttttatgtaaattccatcttatattgaccctttattaaattacaggcgtcttcaatatcgcttggtttattattataatatcattgtaaagtgtttttgtgattgagataaagttaaagtatagataaatttttataaaaatgaggtgtcttattgaataataaaattgaatctttaaaaaatatactagatcattctagtaacattgtattttttacaggtgctggcgtttcggtagcaagtggtgtacctgactttcgttctatgggagggttattcgatgaaatatctaaagaaggttattcaccagaatacttactaagtcgtgattatttgcaagatgatccaaaaggctttatcaatttttgtcataaaagactaatgtatattcgctacattaatcataagtgtttcaataacgcatatatgcaatatgctacaacgtcgccgttttatcctttatttgcgtcgttggatatcaatgccaaaatgcaagaaggcgccttaggacgcaagatgtgggaatcatgtttaaaaacttctatcagtgctcggaaaaaaattgctaaatactgttcattaatcaagccttttattccagaaaaagtaaatgggaaaaattgggaaaaagcagcgactgaaaatatcatgtcgaatattgattattggaagttccgacctgaagaaaaatggcatgggttctctgaatatgagaaagaacaatattttattgatccatttaaattaatcttaacaaggccaggtatcaacacagaaaacgatacttaccttgacttcggtattcctgcagctgtgttaacaatgctaggcatcatgctgagagctttatgaagaatacatgaaacaccatttaattagcaagatgagttagaatattatctttgccattgtgtggctcaggaaatggaggcttctaacctctcttttgattaactaattttatccagagttaataagtggtggtactggtatgtgaaccagtgtgtacctgactccagagcatgagctaataacacttctgctgtctgagggtagatattgctgccatgatatcatttcttctccacctcatatttataagcacccatctgtgcctctacttcacaatgaaactgggccagatagtctctgagatgttcgttcatagctcctgtccccaagagttagtgctacctccccactacttcccttctcctacccccatttcctaaatgcttaggcatctctctgtaatgttttaagtaaggcgttgaacgcccccgtcgttaacatatgtacctcatctataatatatactttatatttggattcacttggtgcgtatttaactttatctcttatatttctaatctcatccacaccgttattactcgccgcgtcaatttcaatcacatcagaatttgtaccttgagtaatacctttacaaatcgcacactcattacaaggttctccatcatcgctattaaggcaagtaatcgccttggcaaacacttttgcgatacttgtcttcccagttcctctgggtccactgaaaatgtaagcatgtgattgtttacctttagagatggcattacgtaacgttttcgtgacgtgtgtttgtccaacaacatcatcgaaactttgcggtctatacattcgatacaaagcttggtaatccactgtaacacatttagtgagataagtatcgttttcattttcaatggcttgttttacttcatttggtgtacttgttgcaagtatagccaatgctgactttggtcctattcccgtcactttaattaaacttaaaaacatatctttttcttcttcatttacaaaaccatagagtagttgcgcatcttctctaacaattaatgaagtaaatatttgaacttctttatccaagtacttttgaaaacgatatgaattaggtgtttgaatttcgtaaccaacaccattaacatctaccactacgtgtgtaggaaacaattgtgttagctgacctttaatatacgcgtacattttagcacatcctcatttacatactcatgcttattaactctactttagacacatgttcaatttctcttaaggcaattactatatcatctatcattaaaatataaacacatacccattaggatggttgttatgaaataaattcccagaaaattggtgaggatggagagaatctggaacctttctgcacagttggcagaaaagcaaaatggtgccgccactatgaaaaacagtatggaagttcctgctgggtgtggtggctcaggtctgtaatcccagcactttgggaggccaaggcggtggatcacgaggtcaggagtttgagtccagcctggccaacatggtgaaacctcatcgctactaaaaataaaaaaaagaaaaattagccaagcatggaggtgcatgcctatagtcccagctactcgggaggctgaggcaagaaattgcttgaacccgggaggtggaggttagaagttagctgtgccactgcactccagcctgggcaacggagtgagactctgtctcaaaaacaagtccaaattcaacttggaaggcctttttctgatttaatcttttttcaatttcatcaggcttcatatcaattatttttgataattctttggctgttttctttttatctacaacatgtcgtggtttcttactattttcacttgcctttttgtcgacaactgctacaactttatacctctcaacatcttcgtctaagactttaccgtttctatcatagattttaccgcgttctggttgctctgagttattcactaaatacttctggttggctttcataattaaatcttgaccattcgagtgtccagtaatcattatgtatgaaaaccttaaaaccaatataaaaaagagcagtccgaataaaccaactagtaggactgcccctattttattttttttaattttaatttttcgtttcgccattattacgcactacccgacaatcccgtgccgcgctgatcgagcaaaacaagctggtagtcctccaacgcgcgcgacagccaaccgggaaacccggggtcacgcaaagtcgggcggggagactcacaccccggaccgccttgcaggaagaccaggtagggcttgtcggttccgttgggggtggccaccagacgcgcgtacacctcaatagtgcgcaaatcgtcaggattgctgcgattcagcgggaccctcagacgaacgtcatcggtcagcaggccaggaatgttgcggttccacgtcatgggatcagcctatgaggtcccgacgccctcacgtcggttctagcgttcgttccctctcccaaggccatcgtcgtcactatcgcggagttgaaggagcgagaccgtcccttcagtattttctcagttttctgccctagtccagtctacactgtactcagttgttcatatctaaatatcacattagctatgaaacaaaccaatataaatactgaagatatagtactaataaacggattcttcaaaaaagaaaacactgactaattttctacaatatatcagctgttcatttgttcttcaataatatttaggctatttcaagtataagaggttcttttatctagtttctaaagggcataaacaatgatgcatgtagtcagatttatttttataaacttttgttgtttcttttgctgtgcaccttactgtgaatacatggacacacagacaaatgtacatttaagtcattagtggttatgagttttgcttatgtggctttttgcttatatggatgtcataaatgacaagataaaataaggaagtttgataaactcatctttaacctgtaaactttagtctcgtcggggagggcgccgacattccaatccttcatcatggactttggcgagaacctgatttgtactgggaagtcgtctccgactgtttcgtggatggcttcgacgatctcgcgcgggaatctcagccggttttcgagggaaccgccgtactcgtcggtgcgatggttgaacttctcggtggcgaattggtccagaaggtagccctcgtggcatgcatgcacttggatcccgtcaaacccggcctcataggccgcttttgcagcgatgcggaactgggcgacgatctggtggatctcggcggtggtgatctcgcgacaagtgatgtgtggattccacttataggggatttctgacggtgctgctggacgttctccctgacgcagtacgaccggcataatgacgcggccaaacccggcgccgacttgcaggaatatagtcaaacttaaagtcgacgcttttggaaggtatgtccacaataaccttagctatcattattgccacctagtttctaattcgtctaaaatatcgttggcaatttcaacttttttgcctttcttaatattaatcatatcttgatttttaaaatgcattgttaattcattttcatctgaactgaatccaattgagtggtcacctacattattggaaataatcacatctgcattttttcgttttaatttatcttgagcatacttttcaatattctgcgtttctgctgcaaaaccaactaaatattgatttgtcttatgctcaccaagatatttaagtatatcttgtgttcgtttgaattttacagttaaatcaccatcttgctttttcattttatgatctagaacttcagaaggcgtataatctgagacacttagacaagaactgagtgagaactaagagagaaagtaggaaatgaacaatgacgatattaaaaggaaagatgagactaaactacgatatcacgtaattattttttttttcaagcagaagacggcatacgagatcatgcctagtctcgtgggctcggagatgtgtataagagacagttccaagaccaagcatgttctaaaaatttttcacgtcctatatcatgacgagaaataccttgttcttttaatttagcatctactttagctcgtatgcaaggatatgatacgctttatttacctggtatggatcatgcgggtattgccacacaagctaaagtctgtctcttatacacatctgacgctgccgacgactccttacgtgtagatctcggcggtcgccgcatcgatttcaaataaaactacttaacatataagtattgggcacaatgtgtagagcctttatttttttgattaacatgtattttaaatgtggatgcaaagtcttgtgctgatttaccaaaactatgtttatactctgcaccattccaaccagttgttgatgtgatgctatcttgttttaatttaaatgcatcatttgatgaactcatctcaaaactaccaccattggttccacccgtgtagttatcattgattgtactacccgattgtttaccccaacccgtaaaagctcgcatctcattattccaaagaattggtgagtagtcttcaactggtttatctaaatcatcatcgccaatcatgaaataatcttcatcatttttagtgatcatgtaataactcgcattctttaatgccgttgcttgaataatcactgggctatctgcagtacctgtacttatttatattgcgattgtgggaattatcgcattaatcgttaatttattaattccggttatcggctcacaattaggaagttttattaataattctcctcaatatttcaaaaaattcacgagtacaatcaataaattaactagtaattcaatttttgctggttattatagtcaaattaatgatcaacttaattcattaacgatgaagatacctacaatgctatcagattattttgatggttttggttcaaaattagcaacttttgcagaagctgtcgctaatgttggtgtagttattgtaacaacgccatttgtattattctttatgttaaaagatggtcataagttcaaagattttacaacaaatattatgccaccaaaattcagaaaagattttcacgatttgcttgaaaaaatgagtgttcaagtagtccatactcgttgcctccattaaatttactatttttatccataccctatgatacatgataataaactagagatgctaacaatatagagtgaaattaaaggagaatattttgtagttttatgaaatgataatttcattattatcaagtagtattaaaaaaagccatcaagtgatattgttatcactcaatggctaaatgtttgattttaaatacctttaccaattccgaaaccgaagtaaagaattgcaataataactactaaaatgattcgataaatggcgaatggtactaattttactttattaattaagtgtaagaaagtcttgatagcgattagtcctacgataaatgctgctaagaatcctaatagatagaaaggaatatgcgctaagtgaatatattcgtaatgttttaataatgataaacagtcatccaaatgaaggtggaagttaatatgacaaatcacaatcatcaacatcatagtcacaatcatgcacatggtcatgtccatacaaataataagaaagtacttttaatctctttctttattataggattatttatgttagtagaaatcatcggtggatttattgccaatagcttggccttactctctgatggatttcacatgttaagtgacaccatctcacttggcgtagcacttatcgcatttatatatgcggaaaagaatgctacacaaactaaaacctatggctataaacgctttgaagtgctcgctgctttattcaatggcgtaactttatttattatcagtcttatgattattatcgaagctattcgtagatttttcgcccctccagaagtgcaatctcaagagatgtttattataagcattctgctgtctcttccactttcatcatgtctaaaatacaagtataaaacatcatactttctacttcatgagcacttgaaatatatgcttcttcaaattccataaaatctgtttcggacatcaattgtcttactaaatcaaactcgccattcaatacatgtttctttataagatgttgcatggcaatgtcctcctattagccagattttatcgtacatttaatattaatcatatcacagatatccttaactttcatttcaaaaaaacaatttaagcttaattaatcatttattattaaaagttgtttgtttaacttcttctaaagcgtccgacaaattgccacctattgataatttaactgcggctgtaaaactaccttctacaataggcgcatccactttaacgattttataattcccatcatacacatcatatgattgttgatgattgtgtactggtaaataacctttaatatattccaattcatatgtaatatcgtttgataaagataaaccttgtaagagcttatccattttattttgaacatgactttgtaattttgtgtcaaaagtacgtacagtacctttacaaaaagctgtatctggaataacactatctgttgatcctgcttgaatcattccgaaagtaagaacagcttcctttactggatcaattgttcgagaaattattttttgggcacttaaaataaactcagccataatgacaatagggtctattgtttcgtgtggttttgcaccgtgaccaccttttccatatatagtcacactaaattcatctggtgaagccattattgctccaggtctagaatagattgtcccagatggataaccatttaaaaatgatgccacataaccgatatctgaatcaggaagtaggggattcactgttaaaaatggtctatcgatatctaaattaactgtagatataatgccatcataactagataaatctaatacatttaaatcacttacagatgcttgggtaattcgttcaatttcactaaacacttgttcgagtcgtgtagctaatagacgacttgtcccaataccgctactacaaacaactagaatatttaaaaattgatgtccttgatttttgatagatccaccaaaatgaagcacgataaaggcgacttcactttctggaaatatcaaatctggccaaaccagacgtaacgccttactcacattatcaaatagtcttggatatttgtacttgatcatatcggttaacggattataagtttcaatatttgatcatcgtgtgtgtgacttgatcatcagctttacctgaatttttagtataatattggatgatttgatcacgttctttgtcatttttaacgattaaattaatgttttcgctaaatcttatagaattcacattagtttcttcaacaggtttaatattaaaggcttttcctcttagtactaaattgtcatttatatttagcatttgcatgctcgtattcacatcgatttcatttgattttaaatgtagcgggcgattaaattggttataatcattcaatgtcataatcgtaataaacacattgttagtactccaaggatcaatattgaacttgttaggtgtatcgcttggtttgagtaaacgccgataatctgaatgattgtctaaaagcacattaaacatggattgggtatatattttcggcgtatcaagtaatactgcagaaattggtttatttaaaattgtaagtgaatctggtactggtgcaggagttagacgtatcgaagcgttaacaggaaaatctgcttttctttatctcgaagatattcagtctaaatttaataccattaaaaatcatgttaaagtcaaatcagatgaacaagtagttggtaaagtaactcagttacaagaagaagaaaaatcattacttaaacaattagaacaacgtaacaaagaaatcacctctcttaaaatgggaaatgttgaagaccaagttgaagttatcaatgacttgaaagtattagcaactgaagtagaagttccaaacgctaaagcgatacgctcaacgatggatgattttaaatctaagttacaagacacgattattgtgttagcaagtaatgttgatggtaaatatatctccttcctatctacacgcattagcattgcaatcgtattaaccttctcgccttgctttaacaattgaagtatatgatagttcttatcattctctatcatagcctcatgcttatctacaaagcttaccttctctataagctcctgtgtcttacgtctatccttatcattacgtatcaccctaactagtaccttatctccattagtaccttgagctttaggcatagccgactcaataccatattgcgctactgatgtactatcatactcatatacttgatggtctatcagtctcttcatccagtgatagtccatgattaattgtcttacttcagttggtgtgtacataggttacctccattacttacgtttctcttctatatatctcacaatgtaatcacgcagataggtgttagcgtagtattatgaaggcgatttcagcttctttactaatggaacaagtgttggccccagtgtacaaatttaagcctaaagatgaaaaaaagtatagtagcgataatgaattgtcaattcaaggtttaaacccatcaaatacaacagaacgaacgaaaaaaatcattgaagacgacatgtctgacttgaagtccagcattttacaaagtcaagatattcaaaacgctatcgtgtcaggctctgatgcaaaaacgattaacaaaacattaattccgcgtgtaattattgaacgctaccccgagttgactactgaggaattagaaacagttcgtcaacatgcagttgctgatattaatgtttcagcagggtctaagacttcgtctgaagatggaaatcgtgaaattattaaaatggccgataggttcattaatattatagtggtgatattccaaagttatataatgtgtcttcagcaatatacaaatatttattgatagaggttcatgaaaaatttataaaattaatagatgtttttaaaaaggaaaatcaggaaccatggacatcatgtgaattcaattttacaaatgaaggcaaattgaatgtatcatttgggtatatagattggaaaaactcagattttgggcaatatgaccggttcaattattatagatataaaaaatttggtattctacctgaaaagaatatgctatagaagaaattaaaaaagtagaaaaatttgttgaagaaaaggagaatgattaatgaaacaagcacaagacttaaaaaagacattatttcaattagatggtcaaaagtacggtgcttataaacgtattaaaaatgtctatgatatttgttttaactctcatgatgaagctgttgaagcaattgacaatcatactgtacgtgaaggtcatgttgtagttattcgctatgaaggtcctaaaggcggtccaggaatgcctgaaatgttagctcctacttcctctattgttggccgaggattagaaaaagatgtggctttaattactgacggtagattttcaggtgctacaagaggtattgcagtgggacacatttccccagaagcagcatctggtggccctatcggattaattagagatggagatgaaattacaattgatttaacaaatagaaagttagatgttgaccagccacaagaagaactttatcgcagacgtgaagagctacaaccatttaaagcaaaagtaaaaacaggatatctggctagatacacctctttagtcacaagattgacatctgattgttcggacatcaacgtataatatttatttttaatttcttctaatttctcatcatgttgttcatcagaaacatataactttgattctaatgtttgtatcgttttatttaattctttttgcttttgtcttagctgatctaaagtttgtatagcttgctctttttcagattttagattgtctaattgagacattaaattgtcttgttcttcttcaaatcttgcatttgtttcagattggttcttttttctttcctcaagcacattaagttgaccagaatacttttcaaattcttctgtagcttttactaaatcataatttaattgttctatattttgatctagctcttgcctttgacctttatacttttgtaataattggttaatttgactttgttcggcctctttattcgacatttactagagaagatatcattgaaatcaattgtcatggcggtatttttactattaatcgtattttggaattaacaatgacgcatggcgctcgaatggctgaaccaggtgaatatacaaaacgggcattcttaaatggaagaattgatttatctcaaacagaagcaggggtggactttattcggtctaaaacagatcgtgcttcaaaagttgcaatgaatcaaatagagggacgtttaagtgatttaataaaacgtcaacgtcagtcaatattagagatacttgctcaggttgaggtaaatatcgattatccagagtatgacgatgtagaggatgcgacgacagagttcttattacaacaatctaaaaatattaaacaagaaattaatcaactattagaaacaggtgcacagggtaaaatgggatgatggaggggatgtgagggagcttggagagtgcagtagagggaggagagagtagggaggtgactgtggggtgttgtaggataaattgggtgttgtttttgaagcagaagagggtataggagttcaggcctagtctcgtgggcgcggaggtgtgtataagggacaggggttagggttagggttagggttagggttagggttagggttagggttagggttagggttagggttagggttagggttagggctgcctcttatccgcacatgactccggcgccgaccccttacgtcaagatcctggtggtctcccctgtggtaacacaaacacacaagtactactatgcaattcaccatacttcatctactaagactaagcagctgatattaaaacttgtgctatctctgatacaagatgaaattcttaatggcatgccgtgaatattacctgaaggtgactcttctggtatattcaagtcaccatgagcatcataccaaatcacaccaagattttcatagtgtttacaaataccagatattgaccccactgctatagaatgatcaccgcctaaaaccaatgggaatctatcatttattatcgtctgatctactttttgacttagcgtctttgagacattaataatttcatcataatttctcaagccttgttgctcagaattaaactttttcaaatctatagctggtacgtctatatttcctttatcttgaacgttaatacctatattttcgagtctatcttgtaatcctgcatatcttatagcatctggacctaaattcactcctaattttctttgtccaaatgtcgaaggcaccccaataaatgtcacgcatagtattagctgaagcatatcgaacacctataggcgtgtttggtggtgtatttaaggatatacctgcctatgaactaggtgcaacagttattcgtcaaattttagaacatagtcaaatagatcctaatgaaatcaatgaagttattctaggaaacgtattacaggcaggtcaaggacaaaatcctgctcgtattgctgcgattcatggtggtgtgccagaagcggtaccttcttttactgtaaataaagtttgcggttctggattaaaagcgattcaacttgcctatcaatctattgtagcgggagataatgagattgttatcgctggaggcatggaaagtatgtctcaatctccaatgcttcttaaaaatagtcgtttcggttttaaaatggaaatcaaactttagaaggtctcatttcgtcatctttaatcatgtcaggatcaatttcatgggtaaagatgccctctttaagtattccaagatcatttaagatttctttcgctaacatttttgtacgacaaatatagatgttgttcttttttagtttcatcttttttcgaaccaatatttcaacttctacattaaaaattcgtttaataagagagtatattcgtcgtgctgtcgttgcattttcagtctgtacgttaattacaaattgttgattagataaacgaagtgcgccattcatacgaattaatgcactgagctctgctttagcatttgcttcatcaacttcaatacgtgttaattcatttttcatgtctgatgcaaagctcatagaatactcattccttcctaaatcaactctattttgatctatgtatggtagctgataccacacacactggtaatctggctcaatcagttctgccatcccacccaggaacagaagacagaaaaactcaccgtgacccccatgattccatcttcaacctgaccgatcagtactccccacttcccaagctccaacccaccaaattatctttaaaaactttgatccctgaatgcttggggagacagatttgagtaataataagactctggtcttctacacagatggctctgcgtgaattactctttctccatggcaattcccctgtcttgataaatcagctctgtctaggcagccggcaaggtgaacccattgggcggttacaattttcccagcaaaagacaggtttcgagggtgttacctcattttgctggctctctggttgtcattccaaaatatgtcaaagaaatatatatataaatgaagcagatgctgacaatattgttcataaacttatgcaactcaagtacgttcacgaaattcaaggttccccatataaatatttgaaaaaaacatatgaaaaagaaaaacatgaaatacaatagagtatcaatttattgcaaaggtggtatccatctttgaagacgcaaaacactgataaggtagttaaaatataattctaagtctggatatacatcaggaggttgtacgtcgatacctacaactggtatgtcataattttctgcagctgaattaatcatattgaattttttgttgccctctggatagggatattttaaggcatttgtcatgatatacatagcctggaaatgtttttcagcagtagggttcattattattgcaacggacgataattgtttctcagaatgaggagttagtagggtgtgtttattacgtcatgtcatctcttaattatgatcattgaatatagttataagatttagcttggtttgctgaaatagcacgagtgtctattacaaatgattgtaataaatgtatgaggacgatttattataaaaccacgataatgagccgatattctgatttgaaaagtaaaaaagcactcatcaaagagtgccgtttgatttaaaagaatgtgagtagtatgaagatgatgaaaaaaatgctagtgaaagtaacttctttccaatttttctcaatggtatatgcccccacggagagtaatagaccaataaggataaaaatattatctactgattttaagtgggatcctccataaatactatctaatataatacgaaggataaaaatgagtacgccaattataatcttattagcaacgctatcattttcaaattgatgattttttgaatcatcatttttatgactttcaaaatcatcttcttcggtgtggtctaaataattattgggttgcacttcatctaaactttgtttcgttgttttgtaagcaatggcacgaataattaaactaataatgataaacaataaacctacaattgtagtggaaagtgcaatcactttcattgagaaaagatcaccagtttcttcactgaaaagaaaaactaaggcgaatgtcatagctgcatggaatatagtcgcaatatagattgtacgtccatgtgttgctctgattaattcaccaataatcatcgagaacatgaatgtatataagaaatggtaaccagcatattcaataccgtaagtagtgtttgcggtgaagattgaatatataatcctatccctaacggtaaacacattaataaaatagctttagtataactccatcctatttgatgccataaatgacctatcataagttgaataatgatgagacataccattaaaattacttcaattatcattggtataatctcacccctttaataaacaatatgactgttgcttgtatgagcaccattaaaacgacaaatagtaacgctttaacatctatgattaaaaaaacctctttcacaatttttaaaggtgcatttaataaatagacagtatgtaatcttaagaatcgaccgatgtaaatacctaatccatttaagaacattaatataactatcaatagtcgatttaaccatacataagacgtaaaatgtgcaatttctaaaaatataagaattgtgaggtatattgctagcctgtgatgtctaaagttgttcttttgtttttgtccatgcgaacgcctccgtttctattcacttttaatataccccctataggtatttaagtcaatcgtatgaactgaggtattgtcagtaaataggtaagaaaaacaaaaaagtacaattcgaccatgcgtaagacatgagaattgtactttaatcatctatattaacagctgtttcgctggtgttgtcatttatatgagtcattggctttttaagtagctagaagaaatctgatggagaaaattgtttaagattaatatctttaacttggttaatatcataattggaaatgttctctaaaagttgtccgtttttcatttgttgatagtattggtcggcttcattaatgacatcatgtgtttgaactgttttaaccacacctaagaacctgctacaacgcgctcgaccggcacgtcatcaccggccgcgccgatcagccggcgctcatccacgacagcgccgtcaccggcacgagccgcacgtacacctacgccgaactgctcgacgaggtcgcccgcctcgccggggtgctccaggcgctcggggtggagaagggcgaccgggtcgtcatctacatgccgatgatcgcggaggccgtcatctcgatgctcgtctgcgcgcgcatcggggcggggcactcggttgtgttcggcggctttgcgcccaccgagctggccgcacgcatcgacgacgcccagcccaaggtcgtgctgtccgcgagctgcggcgtcgagcgcacccgcgtcatcgagtacaagccgatgctcgacgcggcactcgcccgcgcgtcgcacgaggtggggcatcggatagtgtgtacgttgttctattgtcgttatgtaaatttctatgtctatttgataacaaaagagcatgtattgttatactgtttttttgttaatgagcgggcgacaacggagatctgcacgtaaggagtcgtcggcagcgtcagatgtgtataagagacagttccaaggtagacaatataaagtttatcgcggcatgggatctttaggtgctatggaaaaaggttcaaatgatcgttacttccaagactgtctcttatacacatctccgagcccacgagactcctgagcatctcgtatgccgtcttctgcttgaaaaaaaaaacaattttaaactctttatctattagaaaaccaaatatcatcactatcccacccgctactatatttattaatgcaccaaacagaaaaaaagtatgatactgaataattagaaaaatcagacaattttaatgaataagtagttactgcatgttgtagcactaagaaagctaatggttgatgtaaattagcacaatgcaataaacgaattgggctttcaaattacaattaaataatttaaaagtgaacaaataaaattgttaactaaggtggcaccacggtaacgcgtccttattgcgagataagcgttattgtggtgttttttaagcaaaatgtagtatttaaagaataggtagcaacagaaagttagtggttgatgtaaactaacacctactttgaagaaattgggttttgtgaaataaaaaataaatacaaagagtgagttttgaatattacgaatattcggctaattaaggtggtaccacgcgtcagcgtcctttttcataaggcatttaccactgattgtctaaatggcctctcaatatatttatacgcaacagaattctaacacttttacgttattggtgataattctcctagagaactttaatatgccccaatatgaactggtaatcctctacatcctgggatctgccttcatgaatcccttctaaggattctcttcatttctccttcaagttgaattccctacttctttttcttctgccttctttcttttggtttatgtcattgtttagtggtgaaaacgccttagtagttttctcagaaaagttgttttaaaagtttttggttttggttttgtttaaaatctaatgtcacatttcagctggttttagaatttaaattctaaaaccagctgaaatgtgacattagattttaaacaaaaccaaaaccaaaaacttttggtttacattcactagagcatttaatggctgaaaacatcagaaaccatacagataaagtagtagatttaagcccaatgggatgtcaaacaggattttatgtatcatttatcaaccatgatgattatgaagatgttttagatattgttgaaaaaactctaaatgatgttttaaatgcaacagaagtccctgcatgtaatgaaatacaatgtggttgggctgctagtcattcacttgaaggcgccaaagaaatcgcacaagcattcttagataagcgtaatcaatggcacgacgtttttggcaatgctaaataaaataatattttcataaaaaataagccaggatgttagcaatgaaactaacatcctggtttatttaattttataattttttaactagaccaataagtacaaattgatcttcactatcttttaagaagttacttaatttcttttcaaagtcttcaccttttggagctggtttactttgatgtgatttattattgtgctgtggtttacgttgtggacgatctttcgcttttttaattgaaagactaattttgccatcatccgcgattgaaagtactttaacttctacttcatcacctaaagataaatgatcttccacattttcaacatagttgtcagccacttcactaatatggactaagccactttttccttcaggtaactcaacgaatgcaccgaattttttaataccagtgactttacctttaagcttatttcctacttcgattgacatattctaaataaatcctcccgatttcattcgattttaactttattatattcctgttgaagcaatttcacaaggtctatatatggcaccactagcaaaacatgtttatggtgtagaagttgttccgcaagccataaaagatgcggaagacaatgcgactaaaaaccaacttaaaaatacgactttcgaatgtggaaaagcagaagatgttatcttaacatggaaatcacaagggattaaaccaggcgtagtcatggtagatccacctagaaaaggatgcgatgaaactttcttaactactcttttaaaattaaatccgaaaaggattgtttatatatcatgtaacccttcaacgcaacaaagagatgcgcaaatattggctgaacaatacgagttagtagaaattacaccagttgatatgttcccacaaacaactcatattgagactgtagcattatttgtacgtaaagacgaagagtgaatttaatacctaaccctgtgcttaccctaggagcaatggtatagtattcactaattcagtgtttgcagcaactttatagaacgtagctactatgaatgatgactgaatatatatattttaaacaaactttaatgcctggctcaagccattcctttatatatctaaacatcaatcagatctataaatacttattaaatttctgccaagtaaattgtgtcagattttcctaaagcagatataaaatatatagggagataaaacataaagttataatattagctaattataagtttttaataatatatggttgtagttatagttacaaaggtagttttattctttttctatttaagatcatcctgcaaactttttttgttcctaagctttttttttttttttaagagacagggttttaccatgtatcacatctcatacatttacaaaattgagtaaacaaaagatatgtttgccacaataaaaagagtataccgcttgctttcaagcagatactcttatcaatttataatttaaatgtaataatcttttcgaactttgtcttttttgattccaaattgttcgtaatatttcttcattatttttgctatattgtcagcccagtgtatgtcacttgcatattgattctgtcctggtgttttcgggttccatctcatttgataaagtgaaatttgttgattttcaaaatattggtttcttacaaattttgccccacctaaaatcgcctttcgtggcgatgtccaagctttctttttggcataacttttaccagtatgtaccgcattctcatcaaatgcaccgataccataaaaattatagtaactaccagttaaccaaacaagtgcattattagcgtccattggattgcgaattaataagaactgcacaatcgctgtacatattgccccaattgctaaaccaattaaagctaaattagaacctttaacatcaaatttagaaattaaaaaagataatattaaacttatcattaaagccccaaaaaacgaaccgataggtaatatcgctaatggtgctgttggaaatagcatgatgataataacagcggctaaactggcacctttagagatacctatcacatctggagaggcaagtggatttcgaacaacaccttggataattgccccagatatcgctaaactactaccgataatcagtcctaataatgttctagggattctatattcatttaaaataaaattatcatgtgtgaagaactcggatattcaatgatgtaagagcggtctgttaagatatcagtaacttggttgattaattgttcagtagaagaaccgataataatctgttctggatggcaattcacacctcggctgttaaagagataatgtgcaatcgcttgtcttaaccgatattcgccttgctgatggccaggttgtaaaatgtccggcattgattcatcgaagacatcacgcgaatacttgcgaaattgctgccaagggaagtgttgtgtatcgatacgtgccaggtcaaaactgaattgtatatcagaagcagcgggtgcttctttcttaatatctgcgacagggttgtctttcgtcacaatcggcaaagattcaatatctgatacataatagcctgagcgcggtttggaatagatatagccttcatccgcttaatatgttgaatattattgatatagcgtttttcaaggtcagtttcaatattaatttccgccgtttgaagtgcatcatttaataaagattcaaaaatatctacatcgatttctccatgttctttagcatcttcgatagcattgtgattaggataaatatcaacatctctgatatctttcaaccaagttgctacttcgttaaaagtttggttttctaaaccttcccaaggatttcttgccgcaaaaatcgaaatcggagacaacggtgtaataacacgtttcgcatttgaaacaatcattgctatatcattctgttgttgtgaattaaccatatttttcacccttttataaatactttttcaaataattcggatggctttcaatggatgcagatttagcttcacccaatttacatgcgcttcggcgcatcgaaaatgacacaaaataagagagaggcaatataactaaagaaaaagtgagaaatccaatataacatgttgtgtcagcctcctcttttaaaatatcagcagcaccgtacctacgcctgcacctatgccgaacgaagtaacgagtgcttctaatgatttagtcgtgaacatcatcatgtgtcccccaaataagtcttggattgcattggtaatcaacactcctgggacaatcggcatgactgccgcgataataatcgcagagagcgaaccgtcggggaccatattatttccgagtattgcaatcccttcgattacaacagaacctagaaattctggtataaataaagtttttaaattagcgcggtagagcatttctacaaccagataaccaagggaattatagaaggtcaatatcagtcaaacgacagattcccttcaaaacgtcaattaagtgaacatttatctttaagtcaaacaactattgaacatgcatatcaattgttattggatgaaggcttcatatactctaaaccaagatcgggctattacgtatccgatatcgaatcattacctgtacttcccaagcaatatgttatgccaacaattaaatacatcaataatgatgacaatacagatgaagagaaaacaaattacacttattctttcaacttatcagaaatcgatgcagaacattttccctcacatttatttagaaaatatgcaaaagaagtttttgaagataatcagtttgaactgttacaaagaggagataaccaaggggaatttgaattaagacaacaaattgcacggtcaggtgttgtacgatatgtatctgataaataaactttgatatcatgacttgctaaaattgacgcaatgatttgagcaaactcaggtgataaatgtcttgtatcatagtgaatcactgctacaggtgagttatgttttgattttaaaaattgcgctaaaccaagagcaactttagaaactgtgaatcgatttaaacggccttcaccaagacctaattcacctctgatacctgctgtaccgaaagcaagcgttgtttcaaagccttcttgttgttcctctgaagattgttgattataaaagtctttaactaaactgtcgtctatgacgttaatccaattatctttcataaatataaattcccctttaaaaaataatgatgcgacatataaaatttaatgcttaatttaaaatgaggtaaatcaagttctggcaaccatcgaattaaatcgacagatatagcatcattaaaatgcgtaggcattaaactacagaatgcaatcatcttaccatgttcatctctcattacacctataggcgctttagaaagatatggttgtgtgaattgacctacagagaaatgcatttcatttctaccatctaaccatctatcactcacatatttgagttcattaaagaaatcttgtgagaatggtggttcaataatttcaaaagaaatatttaaatcatcaaatttatttaatgtcgctctaaagccacgacgttttttacctgaagttgtgaatgatgttaaatcaatgattgcttcctcacccagtttgaaaaattgattcccaaaatgatgataaagaggcatataattatcatataatactgcacctacaacacgttcgccttttaagaagatttttttgtagacatgatcttgactgttgtagatttcaacgccttcaacttcttcatcttcttgaatttgaccagcactgtataagtcgcagccagatactttcaatgaagtaaatgttgttgaacctttgtagccttctgtttcgcggtctgttaagtaatccgctaacactttgccttgctcatataacggcgcaactaagccgtaaactttaccgttatgctgcgcacattcacccactgcatagatgttttcatcgctagtacgcataaagtcatctacaacaataccgcgttcaacctctaaaccagagtctttcgcttcttgtacgaagggacgaatccctacagccatgactactaaatcagctgatggaatcactaagtatcctcacttcttgtggtttaacttaacagaaccaaatttaattatgacaatcatcgcagctagtatgtactttattcaaccattagtcaattcaattcattaccctaaagatcaaagaaaaacataatatgtaattatggtagtttcgccgatattcattacatatgcttctttaacttccgcttcagcacttggtctatactggagtatcagtgcagcattcctaatagttcaaatgcatcttgcacactcttattatgggaaacaagctaaaaaagaagcagccaaacttaaaaatcaattagaactaaaccaagctaataaaacagagtaataatttgaattaatagaccatataaatagcactatttagagcgtgaagacatctatataggttcttattactacaagctttaattggtgctgcagcagttatttggcaacaaaatgcatacgtattagcattacacttcggtatatcacttgtgagtttctcatctgtcttcttaataacgcttatcgtcttctcaattgaccaaaaatatgaagccgatgaagtaatgattacaacgcctctccgtacattaacttggttaatggcaattattgtttacttaacaatatacgcaggcgcactagtgagacatactaaatctagtttagcttatggtgcatggccagtaccttttgatgatattgtcccacacaacgtacatgactgggtacagttcgcacacagagggatggcatttattacattcatgtggatcatgttcacatttattcatgccgtgaaaaattatgcatcgtcaacctggcttcgctggcgggcgtgggctggccggatgccgtggcgaccatcaaggccgctgacggtctgagcttcgccgacactgccgctttctgcgaacagcacgggatcgtcgggccgcgcagctacttcttctccaaggaagccctgattgcctggaccctgcagaaccgccggacccggcgcgagcgcggcatccgcctgaacgcggtcagccccgggccggtggatacgcccattctcaaggacttcatcgagacccttggcgcccgcgccgaagaagacatgaagaccatggatcgtccgggccgtgccaccgatatcgcgccggtggtggcgttcctgctcggcgatggctcgatctggatgcgcggcaccaacctggcggtggacggtggcatgcaccatccaaatcgtgttgcgatctttgtagccttagccattatgggatttgttggtttaatactaggaacaatgacttggttaggtatgaaatcagtaccaatcttcttccttgcaatgttctttagtatgcaaatggtaatgttaccaaaacaaatgttacctaagttctatcaacattacattgtagattggaatccattcgtacattatgctacaagcttaaaagaaatcatttatatgaatcaccatattgaattaaactcaacaatgtggatgcttattggatttatgattttcggtgctgtgtctagtttattagcagcagcaattagaaaacatagtacaaaacgtactgaagtaccatcataaagttaaacttttaaataaatactgtcgataagctatcaaagaacttgaggaaatcggtttccatcggttttggctggccgagcaccacaacatcgatcacttcctgtcgagtgcaccagatctgctcatggcgcgcattgcgacggcaacgcagtcgatccggcttgggtctggtggggtgatggccatgcactacgggtcgctgcaaatagcggaacggttttcgaccctcacagcgctcttcggtgatcgtatcgacatggggctgggccgggctcccggcggtgacatgctctccgcccatgccctcaatcaggggcaggtcatccgccctgaggccattaattccctcatcgccgaaacggtagggttcgtgcgcgaaatgctaccgtcgaagcatccgtacgcaaaggtcgtcgtgaccccggcaggtcagatccagccacagacgaagttaaccgtattactcacgaaaacaatagtttagtcatttatgatgaagtcattacagcgttcagatttcattatggtgctgctcaagacttacttggtgtcatccctgatttaactgcttttggtaaaattgtaggtggtggcttaccaatcggtggttatggtggccgacaagatataatggaacatgtagcgccacttggtccagcctatcaagcaggtactatggctggtaacccattatcgatgaaagcaggtattgcattacttgaagttttagaacaaaaaggtgtttacgagaagttagataagttaggcaaacgattagaagacggtctattacaattaattgaaaaacatcaaatcactgcaacaataaatcgtatatatggttctctcacattgtacttgtaactgtgtccggacctgccgagacctagacgtaaggagtcgtcggcagcgtcagatgtgtataagagacaggtatagtgatggagatattatgattcaagcttgttcaaatgatcctcaagttacttttcatgccatacataacttaatacgaccttttagagccatcaaatttctcggtgtttcattttttttagtagaaataaaaccatgttgtgaccagcgaattttaatgatgtctctaaaagctgtctcttatacacatctccgagcccacgagactaggcatgatctcgtatgccgtcttctgcttgaaaaacaaaatctgtctcttatacacatctccgagcccacgagaccgtactagatctcgtatgccgtcttctgcttacacaacatagcatatgtcccaaaaagaatagggacttgaaaaacgaaaaaatcactaaatttaaagcattagccattttatcatcagatgcattatcatcagtagcttatggtccagaacagatattaattacattatctgttgtaggcgcagtagcgtcttggtatacattacctattgctgcaggcgttctgattttattagctgcattgatattatcatatcgccaagtgatatatgcttaccctaaaggtggcggagcatatatggtatcgaaaacgaacttaggagagaagtggggacttcttgctggtggttcgttattggtcgattatatattaaccgtagcagttagtatatcctccggtgcagatgcgtttgtagctgcatttccaaatttatatgattacaaagtactcatagcttgtaggtgacttagttatggtgtatgtatatttttttttttttttttttcaagcagaagacggcatacgagataggagtccgtctgtgggctcggagatgtgtataagagacagtgccagtattgattgagtggacagataaaaagactgcaaaaattataattaatactaaattgatatggtaagtcttaaacattgatgttagggttatatatcgttcaccttcatccattattgatagtgttttctcagtgtaattagcttcgcctaatttaggatagcgattatctattttacgtgcgtatagtcctatcattattgaggggatcattgtaatcatatatggaattatagaataaagtgtatagatatcgctaacattacccattacaagtgtgaataaaaacgaatagtcatattaaaataaaaaaactgctcgcaaagcatttagctttgtcggcagctttttacagaacaaatacattaagttcatatatgatacattttaatttttagattgctctaatactttatgtgacgcattaacgcgaccttgtttatcgatttcagtaattttcacttcaattgtatctccaattttaagaacatcttctactttattaattctttcttgtgaaatttgagaaatgtgtaataacgcgtctttaccagggaacaattcaacgaaagcaccatacttttcaatacgttttactttagcatgatatacttgtccaacttccgcttcgcgtgtaatatcttcgataatttcttttgcacggttaatcatcgcttgatctacagcacctataaagaccgtacatattatggtaaatcaaatagcagtcaaatgcgtcttttttaatcaaccttatttaaaaaagaaaattgaattacatggtactgtgactgttaaaggaaaatggaatcgttcaaaacaagaaataaacggcaatagaatgttctttaatcaacaggaaaatcttaacgatacacaattagagcctgtttaccgtattaaagaaggtattaaacaaaaacaattgcgtgatcatatacgtcagtctttaaatgatgtggtgatacatgagtggttatcagatgagttaagaaataagtataaattagagactttagaatttacacttaaccatttacatcatcctcaaggtaagcaagacttatttagagcaagacgtacttatgcatttacagaattatttgtcgattcgtttcctatgtatgttctataatgatacggcgaccaccgagatctacacgtaaggagtcgtcggcagcgtcagatgtgtataagagacagcataaagacgattgaaaaatgaaaataataacgctctctatcgattccggcagttgaaaaagaatagaccgtaatgagcagagtaatgataatactcgttacatcaacattgcccctaacgtatctaataaaaagataataccatatgggctgtctcttatacacatctccgagcccacgagactaggcatgatctcgtatgccgtcttctgcttgaaaaaaaaaaataaaaaaaaaaaaaaaaaaaaacttagatgtgatgtccagttgcataacgtcagaaaaacatgcgacacgacaaagtatgatagaaccagtgcctgttgcggcagattgatgttctttaccgttttggtcacgaagttgaacgactgcgctttgaacaccttcagcaacaaattgaagctgtaagttttcaacgtgataagcagcatttgtttcgtgagaatgaccttgaacaagggcatgcacatcataatcagaaacatttttctttttatcagcaatcgatttaaattgtttgaacaattcaacttgtttttctggactgatttcatatccaagttgttttaatttttccgcaaaagcatgtttgcctgacaatttgccaagcggcaattcagaagttttgataccgactaattgcggagtcatgatttcatatgtttcacgatgttttaagaaaccatcttggtgaataccagattcatggctactacatactaactcaagttgttttaacatttagttgatcagctgtttattgataatcatgcttttacaagttttgagttttttttttttcaagcagaagacggcatacgagataggagtccgctcgtgggctcggagatgtgtataagagacaggtatttgaaaacggaaaagttaaattagataaaggttatggatttaaaaactttgaaaatggtgaaaaaaattcagctaatacgatgtatttaatctgtctcttatacacatctgacgctgccgacgactccttacgtgtagatttaggaagtcgcgcgttctctaaaaaaaaaaatacatagatacattgatggcacacacttactaataagcaccactaatactatgtacattacttcatgctaatactcgtatttactacttccataataatagtgaggcgcatatttatttatcttcagctgacgttatgacacgtaatatgattaaacgtgtcgaaatattgttccctgttgaagataaatcaataggacaacgattagttaactatatgaatttacaattatctgacaaccaaaaaggtcgttaccaagatgcacaaggcctttatcattatgtcgaaaacaattcatctcctttaaactctcaatcttacttgatgcaagaagcaattaagtatggagaagaactaaaaaaacaatcggtacaaccttctggacaacctgttcattctagacgtggcggtagttggatgcgaaaattaaaaaacacatttaaaagataaactcaccttgacaattgtattttatatgaaatgaattataatattgttacagaaatagaaaaatatgcctcagaagatcataaaaaagccattatttacaaggataacgagcatgaaaatatttctgtaagttataaagaacttatcagtaatgctaataaagtagggaatgtattcctcaatcatgggctaaaaaagggagataaagttctcatcatgatgccacgtgcaatcgttacatatgaattatatattgcagcattgaaactagggatagcgattgttccaagttcggaaatgttacgaacaaaagatttacaatatcgaattactcacggagagattgatgcagttatttcatttgattctctaactaaagaatttgaaaacgttaaagaatatgaccaattaaaaaaatttatagtacctggtcacaaaatactaattttataaggaggaaaaaatatgggcatttttagtatttttgtaatcagcacagttcattatcaaccaaacaaaaaataagtggttataatgaatcgttaataagcaaaattcattataaccaaattaaagagggttataatgaacgagaaaaatataaaacacagtcaaaactttattacttcaaaacataatatagataaaataatgacaaatataagattaaatgaacatgataatatctttgaaatcggctcaggaaaagggcattttacccttgaattagtacagaggtgtaatttcgtaactgccattgaaatagaccataaattatgcaaaactacagaaaataaacttgttgatcacgataatttccaagttttaaacaaggatatattgcgactcattcatcttaatatagacgaaaacattctaaaatataaataactgcaacggttgcgacttgttttgaattacaagcttgccgttgcagtttttattactcattttcttcaaaatatttacttatactgaatacaataaaaatggttacgaggccgcttataaccataagtaacaaagtaatgccccctctaaaaattaatcatttttcaatgaagtagtatctactttagttacatttccattttcatctaataatggtgtaataccaccacctgtactcacccaagtagcaagatattgaacgcctgtttctttatcagtcaatacataacaacgcatattagagtcttttgagaccttttctacatcaaagcgatcatctgattttttattattaaacagtttcagcatctatttgttcaagcagctgttggtggtgtgcttttttcgcttgtagctgcttagatgttgcaatggcatcttgatagctgtgattaagctgtatacctttttcgatatctgcttttagttgtttaattttatctaaagtctctttaaaattattctgagcctcttcccatgatcgagagacatccatctctttttcttgttcttttaacaattgaactaaattgttcgagttatccttcaaagcatgttttatcgctacatcgatatttattcttttgcccatcgcagctgaaaacagtccccatgcaggttcttcaataatattttcagcaattttgctgaaatcttttaatttagaggcttctttttgataagccaactcatattccataaatgggattttggatcagacttactaattaaaacttttttgaaagaacatcctccaggcccaagtaaaaccatcgcggatgtaggatgtggatatggtcctatcggtttagcaataggaaaagcatctccacaccatcaaattacaatgttggatattaacaatagagctttggcgttggcagaaatgaataagacaaaaaatcaagtggataatgtaacgattatggaaagcgattgtttgtctgctgtcaatcatcagtgctttgattacattttaactaatccccctattagagctggtaaggacattgttcatcgaatctttgaacaagcgtttgacagactcaaaactacgggtgaactttatgtcgtcattcaaaaaaagcaaggtatgccttcagctaaaaagcacctaaatatctcattcgacctgtacaagtttctgagcaaactgtacgcatgcctgcttcaattctaggaaaacaatatgtacatttttcagctttattcgttttccagttaaaatagacttttttataaggacatccagtcatacaataacgccatccacgacattcatcttgatcaaccaaaacgatgccatcttcatctcttttatacatagctcctgatggacaagacgcaacacaacttggattaagacaatgttcacataatcttggtagatacatcataaatgtttcatcaaattggaacttgatatcttcttctatcttttgaatattaggatctttaggtccagtcacatgaccaccagctaaatcgtcttcccagtttggtccccattcaatatcattcattggaaatgaaccattcgctgtattgttaggtgatgacattgttgaatcagacacaccagcaattaaacaattgatggatatttacgatgaaacaggtaaatccgtaattggagttcaagaagtagctgaagaagatactcaccgttacggtattatcgatccgttagaaaaatctggtttacgttatgaagttaagaaattcgtagaaaagccaaaacaaggtacagcaccatctaatttagcgattatgggacgttatgtattaacacctgaaatctttgattatcttgaaacacaagaagaaggtgcaggtaacgaaatccaattaacagatgcgattgaacgtatgaacgccgaaagccaagtatacgcatacgatttcgaaggtaaccgttacgaccagcagatgatgctgcacctggacctgcgggtggacgacctggcagccgccacggcgtacgcgcaggagtgcggcgcgacagtcgccggcttccagccgcaggaggacgtgcgggtgtgcctggacccggacgggcacccgttctgcctgttcgtgccgcgagactgagcgggagcgctcagaccgcgtcggaccagcgaaccgtgagctcgttgcgcgcgccgaaccgctcgaggtgcgagccgaggacgccctgcacggtggcaagggtcgcggcgtccggggcctcggcccgcagggtgagcacaccgtccccgacggtcaccgagccggttccgccggccagcgcggcggtcgacgtcccgccctcggtcgtgaactcgacccggtggccgaggtgggagtccctatacgtatcaatattaatggtattcgaggtaaatcaacaataactcgaatggcgtatagtgtgcttagagaagaccactatagagtcatagggaagacaacaggaactgacgcaagaatgatgtactggtttacccaaaaagagtacccagtgattagaaaacctcaaggtgctaatattggtgagcaacgtgatatcattcgtaaggttgttaaacaaaaggcgaatgcacttgttaacgaatgtatggctgttaacccagattatcaaattactttccaaaaggatttagtaaaagcgaatattggcgttattgtcaatgttatggaagaccatatggatgtgctaggtccaacattgcaagatgttgctcaatcatttacggcaactattccatactacttattgtatgcgtcttagctttagacgtcttcaaatttttcagactatcttttaaatcttgagaaagttcatttaattttccttcattttttaaaaatcgaagatatgcatgtgcttgattatcattaagcttctttccatcagaagtgagtaatttagaaagttgacgatggtcttctttcttaagtgcatctgaaatttgatccacactttgttctggagacagttgatgctttaaaaatatgaacacacttattaaagtaatggcgatgactgctactaaaattgaaataataattaatggtttattcggtttcttaaattgataagcatcactataacgccctgggggataaggtagacgtacatcatttctagacatagactgttcagagtatcctgatccatagtgcagcagttgttagaactaggctggatagagaacaaaaaaattcccctaggtgcatttcagggttgtcttatttttatgttgtatctcacaggagatcatgtaggtgaagtgctctctctatgatagttcaaaagcagtgggtgctcaatggcattgatcaaccctttccttgccctggactctctaaccaagacaggggattgctgcctgtggctcttaggctacaaagcatttgaacaatctgtgacagctttgtgctcaagctgccaacaaaactcatctgccatgcagtagaatataccacgagttcttgtaggaaagacctaagccctcttttcagctctgtagcagttgtcacaagggcatgcagaatgtatggggcaacctagcaaatgctgcaggtagttccaggtagcgaatcgtcaggagcgcaggtgcccgatgactgcccacggtcgttccggattgaccagggcgtgcaactgctcaagattggttttggcacaggccatgacgacgcatgtggccgggccgccggagcgggttaggtcgacgtcggtgggttggaatgcgacgcgcagtcccgcagtggaggccagctgtttggcctcccaggccaccccatgagacccgaccgggacgcagtcgtgcaccttccccgaagccattagtgccttaacctccgtgacgcccacaatctcgcgccgaccaagggcgacgtcgtcgttaggggccgagatcggagcgccgacacacaccaagacgtctccgtctagggacttcggcacatcctcgatacaccataaacttcaatattattgtaaattgctgtacgtacaactgctctaacggcagcattcatccccggtgaatctccaccgctagtcaaaactgcaattttcttcatgacgacatacctttctataactagatttatcttcaactctaaattaccacaaattttttactacttccatcaaaagaaaggacttatattgatgtaaacgtttttaattatgacttttattttaacgataataaaaatagagtaatagtctataaaatgactactactctatacctctttattctacaaaagagccaatatttctaaatttattaaagcgatcttcagctaattgttctttatcaagttgttctaattcatttaaatgagaaacaaacgcatctttaattgactgcatggagcggacccttcccttctctccaggagctgcttgaaatttgtgaacaaaagcctaacttcaccagctgagagaatacccatccagagaatggctttccccacagctgccaaaagggttgcgtggcctgcctcatggcagggggtggccagatgatcctgtattctaagtccttgcattctaaggtactctcatgccatagtttggtgctgtatttggaagcctgtcctgggttaatgaatggacccttttctctgtctcagatactggaagggcccaaaagctacaatacgttttcaactatgggcagctgctgccaccttgtgccagaaagactccatggctagagtgaccagggacctcagatcaggacactatgaaggggcacttctaatacaatagtttattttgaaaagttatccaataatgaagagaagtaaatgttggatgtttaaaggagtttaaaccagctgaaaataaatagacataaaaaaaccaccatcgtaaaagatggtggttatgtagaatgtagactattttttgaattttttaacgatgtctacgatagttttaacgactttgatgatagttgatacgattatcatgttcatgacctcctttcaaaagggaaatgtatttagagatggttgttgaatattcaaaagctaacttataaaatacgtaacttttaaatattatttttgagtaaattgatcaattaagcctttaacaatttcaacaattttagcgattacatctgccatttaaatgacctcccttactaatttgttatctatagacttcacacttagaaatcctgtcacatccttctttgtcacacaactgggatttacattcctctcctaatacaccatcacaaatgaaaacactgtttctggttccaactgcatattcaatagctgctaagaaaattagaaatgtggactcatttaatgagtcttagcaaattcatacttcaacttagtagtgcaagaagtttaaaaaaaatccgaagtataaatttttgcaaaagatcacaatgagcaaagatttgatttatttaaaggtgaggaaaacggacattcattccttaatcttcccgaggaaaagacaatctaccttgggcaaatgccgaggcaaggtacatatttattaaatgttttctccttccagaatatgccattcaaagctgtcctttatcctatttaccctaaaactatcattttgtgtaactttttgcaattcttttttagttaaattgtacaaaatctaccgcttttttaattaaaatcttaaagcctttaaattagctaccggcattgttacaacggtatatacgaatgtaacattatccacttgtaagtgttcgagttgcctgcgatattaaaagttacttatactcatttgataattaatgttcaaattcgaacttataaataatagtaaaaaaatccttcgcaatgagcctgtcattacgaaggattttttcttgttagcaactaaagttttagtattgatttagcctaagaaacctaaccatttacctaagataccaagggcaaagattgccacgataattaacattgggtttacacccttcttagtcttcatcagtatcaaataaaggtttgagtgcttgcattgtcgaacgtattgcttttctttgtgcgtcggctgagccatcatcagtttgtatggcattaccgcctaacgcgatgacgattttgttatccatatcgttcactccttaattagaatacatttacggcaccagtgattaatctgacaatgccgatgattgctagaattgtgattaatacaaagaagatatagtcaaccttgcttaaaggtttccggttatttttttggacggtttggtaaacgaataagcctggaatatagagcaacatagttaatagtaagtaatctatacccgctgcataaacgagccaaatcgcgtaaacagaagagataataccaataacccattgtttcgttgtagcacgctacaggtatcatgtcattgttagaagatgatgattatattacaagtacacaccgtggacatggtcatgcgattgctaaaggttgtgatttaaacggcatgatggctgaaattatgggtaagaaagatggacttggccatggtaaaggtggctctatgcacgtagccgaaatcgacaaaggtatgttaggtgccaatggaattgtaagtggtggctttggccttgcgacgggtgcgggtatatccattagaaaccagaaaaaagaaaatgttgcagtatgtttctttggtgatggtgcagccaatgaaggtaatttccatgaggggttaaactttgcatctattttaaatttaccagtgatatttgtttgtgaaaataaccaattcgctgaaggtacaacgcctatatggtcatgggggatttttgtagcagtatcaggattgatattaatagcatcagcactttttatcggaagcagtcagcaaagtaaaatatgcagttatctactgttagttggtggctttatggtagcactgttatatttctttatgacatcagcaagtatttttaatgcaattaattggctaaccactgttcacatggcgattatgtctgcaacaggtttaatcgtggcatttgtgggaggtgctgatattgccaagcgaggatagatatgtcagaagtgatgagttccaaaaaactatcggcaatgtttatgaaaaaattaatgataatgaccgtaaacattcagaggctttgaataaattaaaagttaaatttgaaagacacacggtcttgcaaattagggattgcctcagtcgcctgcgtgcaatcaaagtcaatttttaattcatcaccagaatctaattcagtcattttcttttgagcttctattaatgggaaaggacaaaccatcccaactgtgcctaattcatataccattataaatcctccttatgtcgtttgtgtttgttgtttaactgttgtttgttgatttttagtcgattgttgtaattgtttcataggtttaataaaaataaaataactcataaaccatacacctagaatcattgaacctaagccaatccagccttgccagctcattgttgccgtttcaactaaaccattaccgattgagcaaccacctgcaacagaggctccaaagcccattaaaataccaccaattgcactatttcttattggaataataaatcgcctttttctgctttctctcttgcaccctctacatgatctaaaatccatttgatttttgtgccagagaagtaagggtcaagcactaatcctgttttttcgcggaaagtatcttcataaccttggtcgcgtaaagattgaacgatatcttgtgtttggcgggattgccacacaatcgcattataaatcggtcttcctgtatttttatcccaaattacagttgtttccctttggttggtaatcccgatacctaccacttgtctcggataaatatcatcatcatttaaaaccgtcgcaattactgataacacagaagtccaaatctcattggcatcgtgttctacccagcctaaatttggaaaatgctgtgtgaattcgcgttgcgctgtaggtttctatacacaatgaataagctgaaaacaaaattatgaaaacattccatttaggagagcacagaaaagaacacaatacttaggaacaaatgtaataaaacaaatacaaaacttaaacacttgaaaaccattaaaaatcactgtaaggaattaaagaagatctaataaaagaaagatattccaggagttcccatcgtggcgcagtggttaacgaatccaactaggaaccatgaggttgcgggttcggtccctgcccttgctcagtgggttaacgatccggtgttgccgtgagctgtggtgtaggttgcagacgcggctcggatcccgcgttgctgtggctctggcgtaggccggtggctgcagctctgatttgacccctagcctgggaacctccatatgcgaaatatacagtaaatcatcagaaagcgaaaagcaaaaagtaggaagtttacttgctaatgagaaaaaagtaagtacaaaaaatagcaataatttaaaaaataatgaagaatatcagttagaatttatcaaaaacgaccaacaagatgtagaaaaatcaatgaaaaaaattgaaggtaaaataaaaaaatacaatcaagaagttgataaaaaagaagtcgaagcaagtcaattagatgatgaaaaagaatatcaaactacttctgaaagaaacaatactgattctaagatcagttcaattcatgatgaaattcgtgaaataaaattgaatattgatagagaaaaagaaaagcttgaagaagaaaaagaagcgaaaaatttattagaaagtaagtacaaagaataccacaatacgtatccaatactatttcttttcctgttaattgagcataattcagagcttgctgataaagtttttcagtttgtgatgagttaatttggtaaaatgataaatcagaaatatgataagttacttcacttaattggtcttcaattttatctttaccatataaagtcattgattgacgccccattataacattagaatggctattgtttatattctgtttaatacttgttatatttggaaattctttttttagcttgtttactaatagttctgattgtttaaatgttgctccatttgtaacaaagataaccatcatttcatcggtatgataaccagtccttactactaaatgacgtattaaacctgtttttgttttttcgttatatatagatagttaaaaaggtaactgcaaaagcacaaaacgactaccatgctaaaatattaaataaaataggtgcagacactgtcgttcacccagaacgtgatatgggtagacgtatagcgcataatgtagcaagtgcaagtgtattagattatttagaacttgctgatgagcattcaatcgtagagcttaaagcgactgaaaaaatggctggacagactataattaatttagacatccgagcacaatatggcataaatatcattgcaattaaacgagcgaaagaatttatcgtttccccagatccgaatcttagtatagagattggtgatattttaatcatgattggtcatgataatgatttaggtcgtttcgagaaaaatatagccaaataattggtgacgataaattaatgggatatccatttaaacttatacgttcattaaaagtttcaataaatggagatgtaaaagtaccaacttgatagttattttcaaccaatgccgctcttaaatatgctactgtcgatccttttccatttgtaccgcctacgtgtatgcctttaatacggtgttgtgggttatttagtttttctagcatccattccacacgtttaacgcctggtttgatgccaaacttagttctttcatgtatccaatacaagctatctaggtaattcatgatacatactcctatgcttttaattgttcaattcttgctttaacaccatcatatttttcttggtaatgcttttgcttttctttttcttcattaataattttttccggtgctttattgacaaagttttcatatttaaaacttcactgtctgaatgtactgttattttatctttcgggaaatcatttttgagtaatgcttctattgctttcacttgttcttttggacgcgtacgtaaaattaattgatctattacaggttcaatcgccgcgtactgttttattaattcaggggttattgtttgtttagaaatcgcaacccacattgccttcaccctttgaaaagtctctactggaaataaaacaaataaaaaaagcgctatttccgtacaggaaaacagcgcattaaaaagtgcaatacgccactttcctacgccagtatgaactggatcaggttccaagaatttcctcatcaaacacgaggatctcagcctgtaggaacaggcacttccagtggacttattgtattattcctctgagtaggatgttgtccacttccatcacctgcattagcaattggaatatttaattgatccagttcttcgtaataagaattttgagagtgacgtatgacaagtaaatcaacacctatactttcaagtgttttacatgtgtcataaagtgactcacccttttttaaagatgatgtacttgtttcaaaattaataagttttaatcctaatttttgttctgccatctcaaagctacactttgttcgcgttgaattttcgaagaataagtttgatacgtattgaccgttaaattgaggtaatggtcgctcaccagatttgaattggcaagcgatagtaattaaatcataaatttctgaattagataaatgctccattgataataagtgttccataaagcgcgatctatacctttacctttcaaaatactgacaaatcggtaatataaaggtagacgttttaacgtagcgcgaggaattttaaaatcatctggcatatatctaaccccctttttcgcgtatattatgcatgtatcattaaaatcagtaaatgagttaaaacatatgttgaatgtcatctcataatacaaataattgtctacaacaaatacttaaacattatacattattaattcttaaaaataaatatcctagtttcatgtgttctatgaatactgtagaatagaagtaattgagtttaacatcatttcaagataacgtacgcaatttatttttctatttaaaattcgataatatagaattaacaaaaatttaaatattcaaaaacaaatactttatatataccttggatttgaggtgcatgtaaatctaaagcaatcatgcgattagcccctgcagtttcaattaaattagctactaacttagcagtaatcggttcacgactacgtgcttttctgtcttgacgagcatacccataataaggtactacgatgttaatatttgccgctgatgcacgtttacaagcgtcaatcatataagtaattccattagatgtagattaactgggtatgaagtaggttggataataaagacatcgcaaccacgaatactttcttcgatattgagttgaatttctccatcactgaaacgcttaacagaacacttacctaattcaatccctacatgatctgcaacttcctgtgctaaaggttcattacctttgagtgaaaagatctttagggaatacctagtaagaaccaaatcagtgtaaatagcgtccatacaattgttaaggcgattgaatatggcatcagacttgaaagtagggtgccgagtttcatgtttttatcatacttttgagcataagataacaacaacggtaggtaaggcatcattggtgtaattggattggtaatggaatcacctactcggtatatagcttgtgtaaaggcagggtggaagccgactaaaatgagcattggcacaaagataggtgctaagataccccatttagcagaggcgctacccactagcatattgacgagtgcacttaggaagatgacaccaataatcagtacaataccattttgatgttgtagtaatttggcacctttaactgctgtaataacaccaaggtcttcaatctgacctttaactaactcatcatattgttgtgataagaagtttgatattttatttaattcatcattggttaaaggtagttcagaagttagatgcacattttcaacatgacctgatgaaaatacgataaccataatcactaaatgtgtattagcacgaatcaaatgaatattatttataatatcttgattatgattaggacgaacaaccaacgttgcatattgagacatcattgataattcatttgcgaagtatgtcaacgcagatgatgtatcataatgattctcaaccattaattgatttaaacgttgaattttgtttgaattttgatgagatgtttgttctaataattgattaacataatatctaaaacctaattcagatggtgaacgcattgaagacgaagcgagaaaagcattagttgaacgtttcaacggtattttaaatcaagacggtgctgaaatcattgaagaaaaagattggggcaaacgtcgccttgcttacgaaatcgaagatttcaaagaaggtttctacaaccttgtacgtatcaacactgaaaacagtgaagctacagatgaattccaacgtttagcaaaaatcaatgacgatatcattcgttacattgttatccgcgaagacgaagataagtaaaaacagaatgggggcgtttaaatgcttaacagagttgtattagtaggccgtttaacaaaggatcctgaatacagaacgacaccctcaggcgtaagtgtagcgacttttactttagcggttaatcgtacgtttacgaaccataatatgattggagcaactctatcacctcttgatagttatcttttacaaagaggtctaaagacattacatcttcgcatagagcgttcccaagaaaatgctcaaaaacttgcacaacgatgtcgccagtcagattcaattgatgaagttttatatagtggacgaacaggcatgcttagtttaagactgaaccaagcatatagcgtcgctaaatttttagaaaatttagaaatttgtatatttgcagaaagcttaggtggtacagaaacatttatcaccttcccttatacacaaacacacgttgatatgccagatgaggaaaaagacaaacgtggcattgatgaatatctcatcagattgtccgtaggtatagaagattataacgatatagaaggtagtacatccatcaccaggtcattacactggaacactcgtgaatggtttaatgtatcaaattaaaaacttatctggtataaatggtgaaatacgtccgggtattgttcaccgtattgataaagatacttctggattattgatggttgctaaaaatgacatcgctcatcgaggtcttgtcgagcaacttatgaataaaagtgttaaacgtaaatatactgcgttagttcacggtaatatcccacatgattatggcacagtagatgctccaatcggtcgtaataaaaacgatcgtcaagctatggctgtagttgatgatggaaaagaagctgtcacgcacttcaatgtattagagcattttaaagattatacattgattgaatgtgaattagaaactttgtatggtgtctatgttctaccccaatcattctatcccatggatatagttgtttgtctgctttagattttaaagtagcaatcaatactataactagtaaagtgataatcaatgcaagatacgtttgcaatccgaggattaaataataattcatacttaaaataataaaaaagtttacattcattaaccaagttgatacacctaattgatacccaatccatcttaggcataacactagataaggtagtatgagtgcgattactacaaaaacaatatagtattgcaaatggtgatgattcaatttataaaataatggaaatggtacgatgagtaataacaattgagttaatattcttgcaaagtaactatattgtatacttaatgacatgtagcgtaattattattactgctggtgtacctactggagaaaaaggaactacaaatatgatgaaaatccacttagtaggtgatgagattgctaaaggccaaggtgttggtagaggatctgttgtaggccatgcaattgtcgcagatagtgctagtgatttagaaggtaaagatttatctgataaagttattattacaaattctgttgatgaaacattagtaccatatgttgaaaaagctataggtctaattacagaagaaaatggtattacttcaccaagcgcaattataggtttagaaaaaggcatacctactgttgttggtgtagaacaagcaactaaagaaattaaaaatgatatgttagtgactttagatgcgtcacaaggtaaagtgtttgaaggattaagttttgatataaaacttcagaaggaccataaccttgaatataaagttgaatagtcttgtcttgttttatgttaacgatgtagtccatcagttttatgacataagaaatatctttgatgccatcttcaaagcgggatttgatgaacaagttgcgtttagtattgatagggtgttcattgatttgaatatgcgcagcattgacatagtaatggaaaaccgatgaataatggaatctattgctaaatgctccttgtatttctttagtgcttacacgtaccgcatcgatcgcatctaaagctaagtctgcgtcgtcatcaagataccataatggtccatgaacctctccgataatttttatatttttattgtgtttcttaacatctcttgcaacttaattacgatttgttcaaatacaagtgtcggattcacattttgagttaatttcttatgtgcttccgttatatgatcatacatatgcgtcaattgaccatatgttaaacgttgtgcatattgcttaatgtctgtttccaattcagaaaagacgagatgtcctggtgtttgtgctttctcatgcataatatcttgaaagaaggcattgactactgaaagtgtcaattgctgcagctttttattcttagctgctttcatcaaatcaaccaatgcaatcagagccattgtgcgatttgtcagcagcaactggcaccagttgataatattcttgcgcaaattcgctaagtcatattcttcattcaatgcgcgtgcctcttcaatctgtgtggtatatccttgagataagttgctcatgtagtgatccgctgttttagttggcatttgaacgaccgattcaagtggcataccattcgcatcttgaccacttgcatcgccaacaccaaccactttaaatccttcaccattaatataaatggatttgccaacagctgctttcgcattgtggaatacctttttcgccactttactatcaatcacgacgactttctcctgtgtatcgttatcatctttcgtaaaaccatggccttcatcgacccctgacacatgagaatccttttttaaactgatttcaccactgccatgtgtattcgttactttggcagagtatgtactatcttcgctttctttaatttttgcacttttgacaccattaatttgttctacaacacgaatgattatttacaaacactatatgaagaatcgtttttaataaaagcaagtgtgaaagaaggtactgagaaatgaggaaatgtgtattaatgacggtagcagcaagtgctacgctcttattggcaggttgtggcaatggtcaaaaagaagataaagatgttacggtatcgctacctactgaagcaaaggcggataaacttgacgcgcaaggctatgatgcagcgatgcccgtttatagtgcagtgtatgatgcattagttaaatatgataaagataagggtattaaagcaggtttagcagataaatggagcgttgatgaatcagggaaagtttatgaattccatttgaaaaagaatgttaaattctcagatggttcagcattagatgctaagggaggacacccaatcaggccgccccagcccagaggtgtctgcgcgtctgcgcgggcacggcctaccgtggccaccgagtgatgacgcgccccggcaggcggaggtgtcgcatctcgacatgaagatccggcagaagttcgtcgctggaccaacgccgtcagcggtgctatgggacgtcaggagtcagcgctgagattcgctccacacagctaggtgacgacacggaagaagtggcccgtgccgcgtgccgcaggcggcggcgcctcacccgtagggtcgggttgcgggcatcgctccctgccagcggcagcacacgactgtcaggcaaccaacgaggtggaagcgtggggctgcgctacatcgggtcgaaggcgcgagtcgcagacgagatcgtcggtaataaggatgatatgcataatgtttttgtgtttttttttttttttaatgatccggcgaccaccgagatctacacgtaaggagtcgtcggcagcgtcagatgtgtataagagacagggattattttgatgaaaaaagtatggttacagcatttcaagagattgatacggtcatttttataccaagtatcatacatccatctattaaaagaattccagaagtagagaatctaattagtgcagcaaagcaaagcggtgttagtcatattatttatattggatattatgctgatcaacataataatcctttccatatgagtccttactttggatatgctgaacgtcttcttgcttcaagtggtcttgattatacatctgtctcttatacacatctcaccacaggcagcccagtggagaagctgtgaggttactgggtagaacctctcttgaggggtctgctgtgagcccctgagcacccagaaggcacagcacagagagcagcacaggcaggacaaatcttgtctccaaagggccctgcctaggccctgcagcgcatacaagttcgatcagatttgagaaaacagtagacaggctctggtagagcagcaaagacctgcagaatcaaccactttcttcctcctgaagcacagacattggagtagtctctactccaaaggccctcatttaggggaaactaggaataaaagagctgaaatgagacaggtcagatgacctgtaattgaaaggactgagacagctccgcaaacaattataacagcaatgtgtgtgtagggtaccctggcctatctccccaaatcattgtgcctttctagtgctctgagctgcgatgggaggggcagtcttgaagacctctgagatgcctttaagggtatttctctcattgttctgatgaataggatctggctgtcttctatccatattaatatctttagcaatggggcactttgctgcacccttggtattctctccctaatgtacctttttactgcttatgtggccaggctgtgaattttccaaatctttttattctacttcccttctaatgataaattcttcctttaagtcattccttttatctccatatcactgaatacagttgaaggtatccagaaatcagcctgaatgctttgttgcttagatattacttctgccatatatgtatgcgtcagagataccaacgattttagcacctttatcaaataagaatttcgctaagaaacttcctgcgttaccgaaaccttgaattacaattcttgcaccgttaaggtcaagatctttaagtttcgcagcttgttcaatcgcaattacaacaccaagtgctgttgaacggtcgcgtccttctgaaccaccaagcacaattggtttaccagtgataaatccaggagagttgaatttatttaatgcactgtactcatccatcatccaagccatgatttgtgagttcgtcataacgtctggtgccggaatatctttagaaggcccaacaatttgtgaaattgcacgaacataaccacgtgataaacgttcaacttcatgaatactcatttgacggtctacttcgatatcgatatatccattttcaccgattggttcatcaaattgagaaatttgataagcttttggattatcaggataaaagtagtttttacggtcaaatttagaatttgtagcgatatccatatttaaagccattgacgcacgcattgcccagtctactgctctcttattaacaacaggtagaacaccaggatatgcaaggtcaattacgtttgtatttgagttaggttctgctccaaaatgtgcaggtgatggaaagaacattttttagtctgtttttagctctacatgaacttcaagtcctataactgtttcaaaatgcattatttcctctccttataatttttcataagcgtcatgtaggttgaattgtgtttcatattgataatataacatcacaatacaagcacagaattatagaagtacacgtgtaaagatagttagagatttttttttttttttcaagcagaagacggcatacgagatcatgcctagtctcgtgggctcggagatgtgtataagagacagcttctaaataatttactacataatttacaagattttctgagaacattggtaaaattttaggcatagcttcaacacatgtaattctaactttattttgatctacgccatatttattacataattcaggaattctatctgttaattcacctaagaattcaatacctgtaaatccagcgccacctgtctcttatacacatctgacgctgccgacgactccttacgtgtagatctcggtggtcgccgtgtccttacagtgtcaccatgggatcaagaaacagttttagattctgtgaagaaaacgggtcgcctaattgttattgacgaatctaatccacagtgtaacattgctggagacgttgcttcagtgattggagatgtaggatttgattacttagatggtccaattaagaaagtgaccgcaccagacactcctgtaccatttgcagcgaacttagaggcggcatatatgccgaatgctgataaggtattagacattgcatctgaattaattgatgatttaaaaaaggctaacgcataggaggtgtatcacaatgagtgaaaatattattatgccaaagcttggaatgacaatgaaagagggaactgttgaagagtggtttaaatcagagggtgacaccgtaaagtactcggcgtgaaaaacattgataaaaatgtaatacaagctggacaaagcatggggatgacacaatttcaattaatgaaagatgttcaaatgccattagcattaccaatgattattagtggtatacgtctctctagtgtatatgtcattagttgggctacattagcgagttatgtcggtgcaggtggtcttggtgatttagtatttaacggattgaatttatatcacccaccaatgattattagtgcggcaatattagttacgttactagcgctcattgtcgactttttactatcattagttgaaaaatgggcagtacctaaaggtttaaaagtatctagataagaaaagggaggattttatcaatatgaagaaacatatcaaatatacagacatagagaggaccgttttcgaagcggtcttcgatttcttcgttgcggttatacatccgcaagaccacacgaatacgtgcacgcaattcatcaatactgaaaggtttagtcatataatcattggcaccgcggtctaaggcttcgacaatgatatgttcttcatgtcttgcactgatgacaataatcggtatatctgattctttacggatattatgaatgacatctaagccatccatatccggcaatcctaaatctaatagaatcaaattcggatgttctgtacggattctgaaatcgacttctttgccttgttgggctttgacgactttataatagtccatggttaaagacacatcgatcagatgcagtattgattcatcatcttctacaagaatttacaacgcgaagatttgaatgctatcgaagaagcagaaagttataaaaagatcatggaagttctgaatataacacaacaagaagttgcagaaagactttctaaatcatgtacttatattgctaatatgtcacgtttattcaaattaccttcagacgttgctaaaatgtttcgtgatgttttgctttctgatgtacatggtcgcacattactaggtttaaaatctccacagaaaatgaaatcaatagcgaaaaaagctgtgaaagaatcgtggagtgtaagatatttagagagctatatcaatgattatgtaagcaaaacttctccaaagacttcggttgatgaacaaacgttaaataaacccaaatttattcaaaagcaagaaaggtataaaatcttctcaaatttcgtaagttgaacgacaactttacgtttaacggtttgcttttgtggagaggtttgcggttgtctttttggaacactggtttgtgttgcattatcatatggttgataaactttttctacagccatgttgaattactccttattttaatatttctgcaatacgtagtttcgcacttcgtgctcggttattgtcgtctaaatcttcatctgttgctgtgataggttttcgattaacgcgttttaatttcggagtatatgcttctggaatcactggtaaccctctaggtacgtcaggtcctttttcatactcttgaaacatctgcttacataacctatcctctaatgaatggaaagtgataacagatatacgccggcatgggtattcctaaacaagatttagatttcattttcgatagattttacagagttgataaatctcgtgcccgtagtcagggtggaaatggtttaggtttatcaatcgctgagaaaattgtgcaattaaatgatggtacgatccaggtagaaagtgaagttcaaaaatttacgacatttaagattaatttccctttgtaaaataaggttagaatcgtatgaatttaaaagaaattagagaatttagattgctaaaaattggtataaaatacaacttcaaatacgcaactcaatgcaattttcaaaataacgcagaaccgatctatatttggttctgctttttgtatattaataggtaaatgcactttaacaaaatttgaaataatgccgtaattggtcatcgatacgacgtgattcatgacgttctgtaccgataacggctaaaccaccgatttcttctacgccttcgcctaatttgatatctgtaccacgaccagccatgtttgtagcaatggtaactgctcctttttgaccagcatttgctactatttccgcttctcgttcatggtttttagcgtttaatacatcatgtcttacgccgcgtttttttaataaattagaaatatattcagatgtttctacagctactgtacccaataatacaggttgtccttttttatgtttttcaactacatcttcaacaacggcatcaaatttacctttttgactaatgtaaattaagtcagatttatcaacacgttgtacaggtttattagagatgtaatacatctttttcatcatttggcatgactgccacttttaaataatctgcttcgaattggtgcattttataataagtgaatttcaattcttctaatgatggtgcttcattaaaattatgatgtgatagtactacttgaaggcctttttggtgtgccttgtttatgagtgataaataagtatttttgtctttttggtcatcccattcaatgtctaacatgtcataatctgattcatctatgaggttttgaatcacactttgatatttaacttcattcacatgccccttacctccttgggagttagatctatatgtgattaatactttaaattcaaaaggcaattcatttaactcatggacaacttgtttgactcctgtaatattaagttacctcagtcattagaaggtttaaaaccaacattaatctatccattattatcagtagcaattacaggtttattaatgatttacgtatttaacccacctgcttcatggttaaatcacttattgttaaatggattaaatggactttcaggttcaaatattatgttacttggtttagttattggtgcaatgatggcaatcgatatgggtggaccatttaacaaagctgcattcgtctttgctacagcagcacttacagaaggtaatgcagcaccaatcactgccgcaatggttggaggtatgattccaccattagcaattgcaacagcaatgcttatcttcagaaagaaattcacaaaagaacaaagaggttcaattgtacctaactactttcacagctttctatttacaaataaaaccttaaatagttattcgattatattccctctcatatcagatgcgaaacgcaaatgccatgttattctacactactaaaaaattgcataaaaaaagaggatgacatattgtcatcctcaaagattataactcgaattgtctttccagttataaactatatcttaccaccaaccgttagcttgacggaaagaaattgcgttactgattgaaccgtaacgactgttagcgtagctaatcatacctttagtttggttagatactgaaccgtaaccccaagattggttagtttgacctaaaccatggtattgaccgttagaagcgttaacgttaccacctgattcaggcattacaatagcgttcgctttcgtataatgttgaatgctaatggaacttttactaatttttttagctttttgatatgcttgttgatctgaaggataatttaatccatcacgatagtaataatctgtatctgcatgtgcctggtttgacagtgtggctgttgtagacattgcaagtgaagcgattaatgtactacaaatcattgttttaattggtttgaaatatggcaaaatataaatcccctttgtgattggttagtatgaaatcatttaaaatatgtgtttatccatttttaaactttattatccccaattatatgcgaaataagttgtattacaatagaaaaagcaaatctttttataattatttaatgatattaataaaatgattatttgttaatttgattcaacttcttcctggtttagtcttgggagggtgtatgtgtccaggaatttatccatttcttctagattttatagtttatttgcgaagaagtgtttatagtattctctgatggtagtttgtatttctgtgggatcggaggtgagatcccctttatcattttttattgcatctatttgattattctctcttttcttctttattagtcttgctagcggtctatcaattttgttgatcttttcaaaaaaccagctcctagattcactgattttttgaaggttttttttgtgtttttatttccttcagttctgctctgatcttagttatttcttgccttctgctagcttttgaatgtgtttgctcttgcttctctagttcttttaattgtcttaaaggtgatggcgatatcatcttccaaattggacctggtttattcggtgttagagataaagaaggtaatttcagtaaagaacaatttaaaacagttgccgaacgtaagaatgtacgtgctttcgaattaaaattagcgcaaggtgcgaaaacacgtggtggacatatggaaggtaataaagtgaatgaagaaattgctaaaatccgtaatgtagaaccatttaaaaccattaattcaccaaaccgcttcgaatttattcataatgctacagacttgctcaattgggtagatgacatacaacaattaggtcaaaagccagttggatttaaaattgttgtcagtcgtgttgaagacatcgagacactagtcgaaaccatggtagttatacagatccattcgagtcattaagatgacaagaggtgtttgttgtcttatatttttttttttttttcaagcagaagacggcatacgagatcatgcctagtctcgtgggctcggagatgtgtataagagacaggtgctaatacttcttcgtcaatagctaaggcaatttgatcttgaacgactttacgaggaacgtctacacgttcgaatgaccagtttaagatagtgactggaccagttaacatactttaacaggtttatcagttaagctttgtgcataaacagtttctttaactgttaaaggtgcagtccattttacatctccataaataactggtggttttacagcacgtgaaccataagattgaaccctgtctcttatacacggagcagtaacaattccagattatccatcagaaaaagtaacaccaacaatcacagttgaagatcctagtacattaccagacggaaataaaccaggagcagtgtaagttccagtaacattgacatatccagacggcacagaagatcatgtgacagtaccagtaacaacaaacgaacaagcagataacgatgcttacgaaccaacaacagacgaagtcacaaaagatcacggaacaccaacaaccgatgacgaagaaacaggagcagcaacagacgaagccttaccagcagacaaaggaacaccaacaatcactgatgaagatccaagtacatcaccagacggtaatacaccaggaacagagacttatacagacggcacagaagaaaatgtagcaccgccacctacaccagcaacaccaaaggaactgataataaccacggctactaatgtcacgataaattgtaaatcgatatttacatgtgcaaccggtgcaaccatgatcgcaagcatcgcaggatagatacctgcacaaccattttgtccaatggataaaccgaatgttgcggaaaagttagcgataccttcaggtacaccaagacgtgttgtttgtgtttgaatatttaacggtaaagaaccagcacttgaacgtgatgtaaaggcaaaggccaatacttcaaatgttttcttcatatatttgactgggttgataccaaggatagttaaaattacgaggtgaatgatatacatcgtaattaatgctgcataagacgcgtcctctaggctgactagcttgaatcgtataacgtacaccggcgaatatatcataattaaaatgttgaggtttcggttccataaacgctttactgatggtgatttcttgatgaataacatcgaaatattcagcagagcgttcaattgcagctttaatatctgcaccgctaacacgtaatactttaaatgtatttgggaaaggataattgttaatgacatcacgcattgtaacgtgttttgtaaaaccagttgctgaatcaaataaggctgtacaagcaatatctgcgccactcttagctaataagacataatttaaaaaattaataaatggatgtggtgctacacgagcttcaaatgcattatgcacaatcatttcattaggtaatcagttacgcaatatgaaattcaaccagcgcaaggtgttaaagtaagtaaaatagtcaatctccataatgacattgcattagctttggctgcgaaagatgtacgaatagaagcacctattccaggtcgctctgcggtaggaattgaggttcccaatgataaaatctcacttgtcactctaaaagaagttttagaagataagttcccatctaagtataaattagaagtcggcattggtagagatatttctggtgatccaatatcaattcaattaaatgaaatgcctcacttactcgttgctggttcaacaggaagcggtaaatcagtttgtattaatggtattataacgagtatattactcaacacaaaaccgcacgaagttaaacatataaaagcatcatatgacatctattattaatccattgtttttctaatactgcacttataaacctgagtactgacattaaagctaaactaataaaaatgagtagagaaattcttttataaggaatgtagtttgggggtgatttttaatgaaagaagctttttaaaaattctaaaagtcatattatgccagcttcacatagttatttcaattttctgatttttaaaaatccttagggtgctgtttttaaaatactatgtctgttctttttgttctcttccattagataaaagggacttattctcaaatgcaggtaaaacaaaatagagcactatcatttttttatttaataatgcagattagatttaaatgtacagctgaaatcctctttgacttagaggaaaaagagacaaacatccaagaatatgaagaaatgatgacagaaccgaatttctgggatgatcaaaataaagcgcaagaaattatagataaaaacaatgcgttgaaatcagtggtacaaggttaccgtgatttagaagcagaaatcgaagatatgacagccacacatgagctgctgcaagaagaatatgacgaagacttaaaagcggatctggaagaagaaaccaacaacttcaaagaaaaactggaccaattcgaattgcagctgttattaaacggaccttatgatgtcaataatgcgattcttgaattgcatccgggtgccggcggtacagaatcgcaagactgggcaagtatgttattgcgtataattgctctgcttcttatttaattacggccctctgtaacgtaatttcgattggtaattgttttttttcaagcagaagacggcatacgagataggagtccgtctctgggctcggagatgtgtataagagacagggtgatagtgttgttgtcaaaaaagcaggcgatattataccagaagttgtgaaaagtattattgaccgtcgaccagaagatgctgaaacttatcatatgccgacccattgtccaagttgctgtctcttatacacatctgacgctgccgacgcctccttacgtgtagatttcgttggtctgcccattcctaataagacaaagacactccaacattctcattcgtactctcatgattaacactactacgtcacttgtagatggttgtgattctattggctgttcaacgacttctgacggttgttcgttcacaggctcggtagaacctgcattaatatcgttgtcagttgtcgtactatctactggggggacgattcaccgtctactgaagtcgttggtgtaccgccatcaattcctgcatttgaggcttctgtattatcatctgaaccaaccaatgttgcccagtctggtaacacaccatgtggatctgttgcgcctgtatagaaatagttgccaggtgtgttcgcgtctgcattatcacgcggataaactgaaaattccatttcaaatgtgccttgttcgttaccgaatgaacgctcaacttcactatttgttgctactttgtataagttaatatcttctacatccataccttctttattaaagaattgagtagctgtatgtacatagcttgttgctacttttttatagcgagatgtttctggctttgccgccaacgcaaaatgacatttaccaaatggcaaatagagtaatttattaatattatatttttgacaattcagaatatcacttcccactattcctacatcagcaataccttgttctacataagtaggcacatcgcttcctttaactaaaatcatttcaatgttgtcgactgtaagcaataactgtcgctgtctatttaaaagtacagttgcaatatctatctgattaacttgttgtaaatattcgataaaactctttaataaacgaccctttgctaatgcaactcgtaacgatcatgcctagtctcgtgggctcggagatgtgtataagagacagattttaaaagtattagtttctcatatcttcttattatttaaacgtcgttacaataaatactatggtgacgatgcaggtcaatatgagattaaaaaagaagaacataaaaattacacagaagcagaataaatcactatattaaaaagcctgagacataatgagttgtctcgggctttttaatatagtgatagtcatcgttgtaaagtctgtctcttatacacatctccgagcccacgagactaggcatgatctcgtatgccgtcttctgcttgaaaaaaaaaaaaaaagtacaacgatatgaaaattatagttgtattaccagactcaacttgacgaaggcaagtttatggtcgccatttaaattatggttagcttcattaacattagctaatgcttgtttgattgtgtctggatccatagttggattgttttgttcatttaataatgtatctgcatgattgatagcatcatcaaatgctgtttgtctatctggatctgcatcatgataattttcgctgcctttgatatagtctttatttgcgatgccttgtttcaaggctgtcattgcatcgttaagtttttctgcagcttgttgaatcgcgttaacatcaggtactagtaatgcttgattgatttgcttattaaattcgtcacgttgtgcttgatttaaatttggcaattgatcaagtgcttgtgtcacctgttgtttagcattagcagtcaaggatccccgggcacgacatgtgtacttgctgaacagcctgcgtcagacagaccgtgaaaaactcggcgtgggtgggatcaacgcggtcgatgcgtccgccgtaggagcgaggcaagacgacctgcccgcggtggccacgactatgacggttacgacgcttggacatgtcgccactgtattgcggttggacacgtagtgcgatgaagaacgggtgtgtggtgtaccggggcaccgatggtctctgcggtgtccgcgtggcaactgtgtgactatcagtgtgtggcgtaccgtgccctgggtgagagagtgcattcgccccggatgttcccgaccagcggtcgcgacgctgacctacgtctatgccgagcgcactgcagcttaatacctaatactcagtttatgttccattttaccaaatgtctcagcaatgtctactgatgggttttttggttaaatcagattttaaacaaaatccgatattgtagtttgatatgtcccttaagtctcttcatctataacagtttctgcccctcctcctttttttcatgccattctttttataaaagaaactgggtcatttttcctgtagaatttctcacattttgctctgatggttgtaagcttgtggttcagagttttattatatgagatggggacaataacactcatagctaagagaacttttataaggcttacttgagaaaatgtatgaaaataaaggtctagagtttagcaaatgttcatctccaggccctactcatcccattctagcctatgaagggtactaaatagtccttccaatatagagatcctcccagttattgtactaggttttattcccatcatgtttagttcacttaaatatgcttcaatttccactctcgttaattggtgtactctctgaacgtgtttaaactttatgtccagaaaattaaagaactctttaagtttttgggcaatatcacttacataggaaaagctatccatgttcaatcttaacttacaatatctttttacaagctgtttaaaatatgtattccgaaaccctttaaagttaattgtatattcatattgtgttgggttaaccttatcatctggcaaaggtaagtttcgtctatcccaaacgtctttatcccactcgtgtgaactgttgcgtgggcgccgtctgagatcttcactattcatgttgaacctggttccgcttgtcctgggattgttttagcttctcttgatactggttttacagtcggtactgatggtgcagttgtgtctgtctctactgttgttgctggttctgatttattaccgtctttgtctgtcgctgtaactggtaatgtttctccgccttttaagtcttcattcgctggaatatcaatcacatagttaccgttctcatctgttttacctgttgctgttgtgccatctgggaacgtcactgttactgttgaacctggttccgctttacctgtgattgttttatcttcacttgatactggatttacagacggtactgatggcgcttacgtgtacatgtcatatgtccaagttaagtagaaaaggatgaaaataaccctagcctcagacttcttggcaacaccactgccaaagacagaagcgggatcacagaaagcagggatgcagggtgacaggccgaccctataggctcgattaggaagggagtcagaaaccataccactcgcttatctttcttgcaaagaatacaagcattacttgaaggtccaccccagctgagaagcgaatcaaaagaaactctcaggaatgaaggtgtggtgtgaaaaggttgtaggtcttcacttattcacctcatgtccagactcagagatgtattggctggtgtgttccatcgcccctacagcctaactctacaagcttccttgcccgaagtcgtaacaaggtagccgtatcggaaggtgcggctggatcacctcctttctaaggatatattcggaacatctcgtagagatgatacggaataacgtgacatattgtattcagttttgaatgtttatgttaaaacattcatgtttaattgaatattgcatttactattatattttgttataatacttagatgtgattattaattaatgacattgtacattgaaaactagataagtaagtaaatagattttaccaagcaaaaccgagtgaatagagttttaaataagcttgaattcataaaaaataatcgctagtgttcgaaagaacactcacagattagtttgattagctcatcatactaaatagtgtttgtaacatttaagttactttattggaattaacgttgacatattgtcattcagttttcaatgttcattttcttcaacacaagaattaattatactcgttattaacttgaaagtcaacaatatttttgaaaaatatttaattagccacaaaaaaagacctatcggtcaaatgtggttgcctggcaacgtcctactctagcggaacgtcagtccaactaccatcggcgctaaggagcttaacttctgtgttcggcatgggaacaggtgtgacctccttgccattgtcaccagacaagtgaatgtgatgattcatctgtttgagtactttcagccgctttttcttctgctgatgattcatctgtttgagtactttcagccgctttttcttctgctaatgattcatctgtttgagtactttcagccgctttttcttctgctgatgattcatctgtttgagtactttcagccgctttttcttctgctgatgattcatctgtttgagtactttcagccgctttttcttctgctgatgattcatctgtttgagtactttcagccgctttttcttctgctaatgattcatctgtttgagtactttcagccgcttttaagattacggtactccaacaactgaagaagatgtaactggagcagtaacgattccagattatccatcagaaaaaggaacaccaacaatcacagtagatgatccaagtacattaccagacggtaatacgccaggaacagtcgacgttccagtaacagtgacatatccagatggcacagaagatcatgtaacagtaccagtaacaacaaatgaacaagcagataacgatgcttatgaaccaacaacagacgacgttacaaaagattacatgcttatgaaccaacaacagacgacgttacaaaagattacggtactccaacaactgaagaagatgtaactggagcagtaacgattccagattatccatcagaaaaaggaacaccaacaatcacagtagatgatccaagtacattaccagacggtaatacaccaggaacagtcgatgtacctgtgacagtgacatatccagatggcacagaagatcatgtgacagtaccagtgacaattttgaaacgagtgaaaacgagtttcttattgtcttgatactatatagaaactgtctcttatacacatctccgagcccacgagactaggcatgatctcgtatgccgtcttctgcttgaaaaaaaaaaaacaaataataacacaacccactaactatacccaaaagaaaaaccaatgaccaaagaagggagaacgtgcaagtacaagaacaaagaactgggcccgcggaggagtgctgtttggtaatgtacttggatcatctactgtgattgttggtgttcctttttctgatggataatctggaattgttactgctcctgttacatcatcctcagttgttgggtcaccgtaatcttttgtaacgtcgtctgttgttggttcataagcatcgttatctgcttgttcatttgttgttactggtactgttacatgatcttctgtgccatctggatatgtcactgttactggaacgatggtagaggtgcgaatcaacaagaggacgtagcgcaaagtaatgcaacaaaacactacgatagagatgcatttgaaacgaacaacactggtaatgacttacatggtagaggtgcgaatcaacaagacgacgtagcgcaaagtagtgccacaaaacactacgatagagatgcatttgaaacaaacaacactggtaatgacttatatggtagaggtgcgaatcaacaagaaagattacggtactccaacaactgaagaagatgtaactggagcagtaacgattccagattatccatcagaaaaaggaacaccaacaatcacagtagatgatccaagtacattaccagacggtaatacaccaggaacagtcgatgtacctgtgacagtgacatatccagatggcacagaagatcatgtgacagtaccagtgacaacaaatgaacaagcagatatcgtttcaaatgcatctctatcgtagtgttttgttgcattactttgcgctacgtcctcttgttgattcgcacctctaccatgtaaatcattaccagtgttgttcgtttcaaatgcatctctatcgtagtgttttgttgcattactttgcgctacgtcctcttgttgattcgcacctctaccatgtaaatcattaccagtgttgttcgtttcaaatgcatctatccatcagaaaaaggtacaccaacaatcacagtcgatgatccaagtacattaccagacggtaatacaccaggaacagtcgatgtacctgtgacagtgacatatccagatggcacagaagatcatgtaacagtaccagtaacaacaaatgaacaagcagataacgatgcttatgaaccaacaacagacgacgttacaaaagattacggtactccaacaatttttttttcaagcagaagacggcatacgagatcatgcctagtctcgtgggctcggagatgtgtataagagacagtttctatatagtatcaagacaagaagaaactcgttttcaactcgtttcaaaaaataagaaaagagccgaaattcgactcttttcttaagaaatattttttcgctctttttttcgctctttcatcgttacgatatgttttttaagaaagagtctaaagagattaaacaaaaataagaggaatttgattgattttgattttaggttttgaaacgagttgaaaacgagtttcttcttgtcttgatactatatagaaactgtctcttatacacatctccgagcccacgagactaggcatgatctcgtatgccgtcttctgcttgaaaaaaaaaactgtgattgttggtgttcctttttctgatggataatctggaatcgttactgctccagttacatcttcttcagttgttggagtaccgtaatcttttgtaacgtcgtctgttgttggttcataagcatcgttatctgcttgttcatttgttgttactggtactgttacatgatcttctgtgccatctggatatgtcactgtagcatatcgctttagcgattaggggctcttatgcattagcgcaagctaaggcgaaccaaagagaagcatatcgctttagcgattaggggctcttatgcattagcgcaagctaaggcgaaccaaagagaagcatatcgctttagcgattaggggctcttatgcattcgcgcaagcaactgcgaaccaaagagatgaatcatcagaagaagaaaaagcggctgaaagtacaaaaacagatgaatcatcagcagaagaaaaagcggctgaaagtacacaaacagatgaatcatcagcagaagaaaaagcggctgaaagtactcaaacagatgaatcatcagcagaagaaaaagcggctgaaagtacgaatcatcagcagaagaaaaagcggctgaaagtactccaacagatgaatcatcagcagaagaaaaagcggctgaaagtactccaacagatgaatcatcagcagaagaaaaagcggctgaaagtactccaacagatgaatcatcagcagaagaaaaagcggctgaaagtactcgtattaccgtctggtaatgtacttggatcatctactgtgattgttggtgttcctttttctgatggataatctggaatcgttactgctccagttacatcttcttcagttgttggagtaccgtaatcttttgtaacgtcgtctgttgttggttcataagcattctgtttcttcttgtttttcatctttagcaattgcttcttttttggcttcttgtatttcttgcgcttgtggtgattcgtctgctaaattacttgatgtttctgattgaattgctcgacgttgtgctgtaagtgcatctgtttcttcttgtttttcatcgctaacgtcaaaggagcaagctcctcgtctgttcgctcgacttgcatgtattaggcacgccgccagcgttcatcctgagccaggatcaaactctccataaaaatttatgatgtttgattagctcatcatactaaatagtgtttgtaacatttaacgttccagtaacagtgacatatccagatggcacagaagatcatgtaacagtaccagtaacaacaaatgaacaagcagataacgatgcttatgaaccaacaacagacgacgttacaaaagattacggtactccaacaacccccccccccccccccccccccccccccccccccccccccccccccccccccccccccccccccccccccccccccccccccccccccccccccccccccccccccccccccccccccccccccccc
